United States Patent Application Publication US 2019/0048337 A1 - sequence listing, part 24

SEQ ID NO: 802914 - RNA, 20 nt, Artificial Sequence
  Synthetic
uuuugaaauggaaaggcaag

SEQ ID NO: 802915 - RNA, 20 nt, Artificial Sequence
  Synthetic
cuuugggaggccaaggcaag

SEQ ID NO: 802916 - RNA, 20 nt, Artificial Sequence
  Synthetic
uaggaauugaggaaggcaag

SEQ ID NO: 802917 - RNA, 20 nt, Artificial Sequence
  Synthetic
uauagagaaaaccaggcaag

SEQ ID NO: 802918 - RNA, 20 nt, Artificial Sequence
  Synthetic
acuugggaagcugaggcaag

SEQ ID NO: 802919 - RNA, 20 nt, Artificial Sequence
  Synthetic
auuuacugaaaaagggcaag

SEQ ID NO: 802920 - RNA, 20 nt, Artificial Sequence
  Synthetic
uauuagaucugaagggcaag

SEQ ID NO: 802921 - RNA, 20 nt, Artificial Sequence
  Synthetic
auagauuugacuagggcaag

SEQ ID NO: 802922 - RNA, 20 nt, Artificial Sequence
  Synthetic
uuccaaaaucagugggcaag

SEQ ID NO: 802923 - RNA, 20 nt, Artificial Sequence
  Synthetic
uaguuuaaaccuugggcaag

SEQ ID NO: 802924 - RNA, 20 nt, Artificial Sequence
  Synthetic
auaucauugaaaauggcaag

SEQ ID NO: 802925 - RNA, 20 nt, Artificial Sequence
  Synthetic
augugaccuaaucuggcaag

SEQ ID NO: 802926 - RNA, 20 nt, Artificial Sequence
  Synthetic
cuggaaaacagucuggcaag

SEQ ID NO: 802927 - RNA, 20 nt, Artificial Sequence
  Synthetic
uauccaaugcuucuggcaag

SEQ ID NO: 802928 - RNA, 20 nt, Artificial Sequence
  Synthetic
ugagguauaaaaguggcaag

SEQ ID NO: 802929 - RNA, 20 nt, Artificial Sequence
  Synthetic
ucugaaaaauagguggcaag

SEQ ID NO: 802930 - RNA, 20 nt, Artificial Sequence
  Synthetic
auauuguuaaaauuggcaag

SEQ ID NO: 802931 - RNA, 20 nt, Artificial Sequence
  Synthetic
caauguguuuucuuggcaag

SEQ ID NO: 802932 - RNA, 20 nt, Artificial Sequence
  Synthetic
aauucuuuaacuuuggcaag

SEQ ID NO: 802933 - RNA, 20 nt, Artificial Sequence
  Synthetic
agcaaggccauggaugcaag

SEQ ID NO: 802934 - RNA, 20 nt, Artificial Sequence
  Synthetic
ccagguaacacugaugcaag

SEQ ID NO: 802935 - RNA, 20 nt, Artificial Sequence
  Synthetic
ccaggucaugcugaugcaag

SEQ ID NO: 802936 - RNA, 20 nt, Artificial Sequence
  Synthetic
cuuccagccugcucugcaag

SEQ ID NO: 802937 - RNA, 20 nt, Artificial Sequence
  Synthetic
aagucaugaccuugugcaag

SEQ ID NO: 802938 - RNA, 20 nt, Artificial Sequence
  Synthetic
uucugggaaccaauugcaag

SEQ ID NO: 802939 - RNA, 20 nt, Artificial Sequence
  Synthetic
agguuggaaguaguugcaag

SEQ ID NO: 802940 - RNA, 20 nt, Artificial Sequence
  Synthetic
ccuuccccaaaauuugcaag

SEQ ID NO: 802941 - RNA, 20 nt, Artificial Sequence
  Synthetic
caaaagagaucaaaaucaag

SEQ ID NO: 802942 - RNA, 20 nt, Artificial Sequence
  Synthetic
aaacaagaccagcaaucaag

SEQ ID NO: 802943 - RNA, 20 nt, Artificial Sequence
  Synthetic
uguugcaauagucaaucaag

SEQ ID NO: 802944 - RNA, 20 nt, Artificial Sequence
  Synthetic
accaagaagauaacaucaag

SEQ ID NO: 802945 - RNA, 20 nt, Artificial Sequence
  Synthetic
uuaaaacuucccacaucaag

SEQ ID NO: 802946 - RNA, 20 nt, Artificial Sequence
  Synthetic
cuugaacuccugacaucaag

SEQ ID NO: 802947 - RNA, 20 nt, Artificial Sequence
  Synthetic
acaaugugaaaaucaucaag

SEQ ID NO: 802948 - RNA, 20 nt, Artificial Sequence
  Synthetic
auaaagguuauuucaucaag

SEQ ID NO: 802949 - RNA, 20 nt, Artificial Sequence
  Synthetic
cugcgaaguccaagaucaag

SEQ ID NO: 802950 - RNA, 20 nt, Artificial Sequence
  Synthetic
ugucaaauuuuucuaucaag

SEQ ID NO: 802951 - RNA, 20 nt, Artificial Sequence
  Synthetic
auuuauuuuauuguaucaag

SEQ ID NO: 802952 - RNA, 20 nt, Artificial Sequence
  Synthetic
agaaucuaaacauuaucaag

SEQ ID NO: 802953 - RNA, 20 nt, Artificial Sequence
  Synthetic
uguagucccagcuacucaag

SEQ ID NO: 802954 - RNA, 20 nt, Artificial Sequence
  Synthetic
aguugauugcauuacucaag

SEQ ID NO: 802955 - RNA, 20 nt, Artificial Sequence
  Synthetic
ucuugaacucugaccucaag

SEQ ID NO: 802956 - RNA, 20 nt, Artificial Sequence
  Synthetic
ccugaacacagagccucaag

SEQ ID NO: 802957 - RNA, 20 nt, Artificial Sequence
  Synthetic
uguugaaccucauccucaag

SEQ ID NO: 802958 - RNA, 20 nt, Artificial Sequence
  Synthetic
uaaaccuaauguuccucaag

SEQ ID NO: 802959 - RNA, 20 nt, Artificial Sequence
  Synthetic
cucugccuccccagcucaag

SEQ ID NO: 802960 - RNA, 20 nt, Artificial Sequence
  Synthetic
cauaacaugcucagcucaag

SEQ ID NO: 802961 - RNA, 20 nt, Artificial Sequence
  Synthetic
cuccgacucccuggcucaag

SEQ ID NO: 802962 - RNA, 20 nt, Artificial Sequence
  Synthetic
uaagagguccacaucucaag

SEQ ID NO: 802963 - RNA, 20 nt, Artificial Sequence
  Synthetic
aagucuugaccacucucaag

SEQ ID NO: 802964 - RNA, 20 nt, Artificial Sequence
  Synthetic
agauguuuaauauucucaag

SEQ ID NO: 802965 - RNA, 20 nt, Artificial Sequence
  Synthetic
uucaagagagauuucucaag

SEQ ID NO: 802966 - RNA, 20 nt, Artificial Sequence
  Synthetic
uggccaagcccaaagucaag

SEQ ID NO: 802967 - RNA, 20 nt, Artificial Sequence
  Synthetic
aucuguaaaggaaagucaag

SEQ ID NO: 802968 - RNA, 20 nt, Artificial Sequence
  Synthetic
agauauaacuaacagucaag

SEQ ID NO: 802969 - RNA, 20 nt, Artificial Sequence
  Synthetic
agaaaugacaaguagucaag

SEQ ID NO: 802970 - RNA, 20 nt, Artificial Sequence
  Synthetic
ucacaaacgugaaggucaag

SEQ ID NO: 802971 - RNA, 20 nt, Artificial Sequence
  Synthetic
auugacauaaauaugucaag

SEQ ID NO: 802972 - RNA, 20 nt, Artificial Sequence
  Synthetic
uuuguuucuuguaugucaag

SEQ ID NO: 802973 - RNA, 20 nt, Artificial Sequence
  Synthetic
acacaccggggccugucaag

SEQ ID NO: 802974 - RNA, 20 nt, Artificial Sequence
  Synthetic
cagccccagcuccugucaag

SEQ ID NO: 802975 - RNA, 20 nt, Artificial Sequence
  Synthetic
caaauauucauugugucaag

SEQ ID NO: 802976 - RNA, 20 nt, Artificial Sequence
  Synthetic
uaagcagcaaagcauucaag

SEQ ID NO: 802977 - RNA, 20 nt, Artificial Sequence
  Synthetic
aauuuaauagaucauucaag

SEQ ID NO: 802978 - RNA, 20 nt, Artificial Sequence
  Synthetic
cacacuccccuucauucaag

SEQ ID NO: 802979 - RNA, 20 nt, Artificial Sequence
  Synthetic
ugacagagcucugauucaag

SEQ ID NO: 802980 - RNA, 20 nt, Artificial Sequence
  Synthetic
cauuugagacaauauucaag

SEQ ID NO: 802981 - RNA, 20 nt, Artificial Sequence
  Synthetic
uauagaauuguauauucaag

SEQ ID NO: 802982 - RNA, 20 nt, Artificial Sequence
  Synthetic
aaaagaugaaaguauucaag

SEQ ID NO: 802983 - RNA, 20 nt, Artificial Sequence
  Synthetic
uuacuggaguuguauucaag

SEQ ID NO: 802984 - RNA, 20 nt, Artificial Sequence
  Synthetic
agucuuaccuauuauucaag

SEQ ID NO: 802985 - RNA, 20 nt, Artificial Sequence
  Synthetic
ucauuucacaggccuucaag

SEQ ID NO: 802986 - RNA, 20 nt, Artificial Sequence
  Synthetic
agguguggcaggucuucaag

SEQ ID NO: 802987 - RNA, 20 nt, Artificial Sequence
  Synthetic
uuugaaaguuguucuucaag

SEQ ID NO: 802988 - RNA, 20 nt, Artificial Sequence
  Synthetic
agaauguauuugaguucaag

SEQ ID NO: 802989 - RNA, 20 nt, Artificial Sequence
  Synthetic
uuccgccucccagguucaag

SEQ ID NO: 802990 - RNA, 20 nt, Artificial Sequence
  Synthetic
ugaaacuugaauauuucaag

SEQ ID NO: 802991 - RNA, 20 nt, Artificial Sequence
  Synthetic
aaggugggauguauuucaag

SEQ ID NO: 802992 - RNA, 20 nt, Artificial Sequence
  Synthetic
uucuuaacauguguuucaag

SEQ ID NO: 802993 - RNA, 20 nt, Artificial Sequence
  Synthetic
cauuuuccagaauuuucaag

SEQ ID NO: 802994 - RNA, 20 nt, Artificial Sequence
  Synthetic
agaacacugauauuuucaag

SEQ ID NO: 802995 - RNA, 20 nt, Artificial Sequence
  Synthetic
aguaacuuaaauuuuucaag

SEQ ID NO: 802996 - RNA, 20 nt, Artificial Sequence
  Synthetic
uagcuggaaaaaaaaagaag

SEQ ID NO: 802997 - RNA, 20 nt, Artificial Sequence
  Synthetic
cacaauguacacaaaagaag

SEQ ID NO: 802998 - RNA, 20 nt, Artificial Sequence
  Synthetic
caacuuaucuuuaaaagaag

SEQ ID NO: 802999 - RNA, 20 nt, Artificial Sequence
  Synthetic
cagaaagacacacaaagaag

SEQ ID NO: 803000 - RNA, 20 nt, Artificial Sequence
  Synthetic
uaaaauccugaccaaagaag

SEQ ID NO: 803001 - RNA, 20 nt, Artificial Sequence
  Synthetic
uucacuuuaaaagaaagaag

SEQ ID NO: 803002 - RNA, 20 nt, Artificial Sequence
  Synthetic
cuagugaguuaagaaagaag

SEQ ID NO: 803003 - RNA, 20 nt, Artificial Sequence
  Synthetic
aagauaacaggagaaagaag

SEQ ID NO: 803004 - RNA, 20 nt, Artificial Sequence
  Synthetic
uuuuguaagcuauaaagaag

SEQ ID NO: 803005 - RNA, 20 nt, Artificial Sequence
  Synthetic
ucagagagaagguaaagaag

SEQ ID NO: 803006 - RNA, 20 nt, Artificial Sequence
  Synthetic
ucuuggcaaguuuaaagaag

SEQ ID NO: 803007 - RNA, 20 nt, Artificial Sequence
  Synthetic
uagcuucacaucacaagaag

SEQ ID NO: 803008 - RNA, 20 nt, Artificial Sequence
  Synthetic
cuagagaacauuccaagaag

SEQ ID NO: 803009 - RNA, 20 nt, Artificial Sequence
  Synthetic
uuuccaccagcagcaagaag

SEQ ID NO: 803010 - RNA, 20 nt, Artificial Sequence
  Synthetic
auuaugucaucagcaagaag

SEQ ID NO: 803011 - RNA, 20 nt, Artificial Sequence
  Synthetic
uaauggagacuuucaagaag

SEQ ID NO: 803012 - RNA, 20 nt, Artificial Sequence
  Synthetic
agcacauagaguagaagaag

SEQ ID NO: 803013 - RNA, 20 nt, Artificial Sequence
  Synthetic
uaagggaaguggggaagaag

SEQ ID NO: 803014 - RNA, 20 nt, Artificial Sequence
  Synthetic
uggggaaagacuggaagaag

SEQ ID NO: 803015 - RNA, 20 nt, Artificial Sequence
  Synthetic
caauuucaacaaugaagaag

SEQ ID NO: 803016 - RNA, 20 nt, Artificial Sequence
  Synthetic
caagacccagagugaagaag

SEQ ID NO: 803017 - RNA, 20 nt, Artificial Sequence
  Synthetic
cuguguguugggugaagaag

SEQ ID NO: 803018 - RNA, 20 nt, Artificial Sequence
  Synthetic
ugucgagaugcuugaagaag

SEQ ID NO: 803019 - RNA, 20 nt, Artificial Sequence
  Synthetic
ucaagaauuuagauaagaag

SEQ ID NO: 803020 - RNA, 20 nt, Artificial Sequence
  Synthetic
accuggucuacucuaagaag

SEQ ID NO: 803021 - RNA, 20 nt, Artificial Sequence
  Synthetic
cuucaguggauauuaagaag

SEQ ID NO: 803022 - RNA, 20 nt, Artificial Sequence
  Synthetic
uaagaagagcuauuaagaag

SEQ ID NO: 803023 - RNA, 20 nt, Artificial Sequence
  Synthetic
auaaggccugaguuaagaag

SEQ ID NO: 803024 - RNA, 20 nt, Artificial Sequence
  Synthetic
cuacuuuucucaaacagaag

SEQ ID NO: 803025 - RNA, 20 nt, Artificial Sequence
  Synthetic
ccucuggauagaaacagaag

SEQ ID NO: 803026 - RNA, 20 nt, Artificial Sequence
  Synthetic
agagcaggcuagaacagaag

SEQ ID NO: 803027 - RNA, 20 nt, Artificial Sequence
  Synthetic
auaaaaauaauacacagaag

SEQ ID NO: 803028 - RNA, 20 nt, Artificial Sequence
  Synthetic
aagugcucuguacacagaag

SEQ ID NO: 803029 - RNA, 20 nt, Artificial Sequence
  Synthetic
ugaaauauuugccacagaag

SEQ ID NO: 803030 - RNA, 20 nt, Artificial Sequence
  Synthetic
cugcaggcaaggcacagaag

SEQ ID NO: 803031 - RNA, 20 nt, Artificial Sequence
  Synthetic
aagagaaagagacccagaag

SEQ ID NO: 803032 - RNA, 20 nt, Artificial Sequence
  Synthetic
uuuggguauauacccagaag

SEQ ID NO: 803033 - RNA, 20 nt, Artificial Sequence
  Synthetic
uuugaguauguacccagaag

SEQ ID NO: 803034 - RNA, 20 nt, Artificial Sequence
  Synthetic
aacaaaugguaggccagaag

SEQ ID NO: 803035 - RNA, 20 nt, Artificial Sequence
  Synthetic
acuuacaaccaugccagaag

SEQ ID NO: 803036 - RNA, 20 nt, Artificial Sequence
  Synthetic
aaggggacgcuuuccagaag

SEQ ID NO: 803037 - RNA, 20 nt, Artificial Sequence
  Synthetic
ccagcaaaggaaagcagaag

SEQ ID NO: 803038 - RNA, 20 nt, Artificial Sequence
  Synthetic
ccaugugaagacagcagaag

SEQ ID NO: 803039 - RNA, 20 nt, Artificial Sequence
  Synthetic
aacaccuuuaaacgcagaag

SEQ ID NO: 803040 - RNA, 20 nt, Artificial Sequence
  Synthetic
agcacuuugggaggcagaag

SEQ ID NO: 803041 - RNA, 20 nt, Artificial Sequence
  Synthetic
agacugaaaaggggcagaag

SEQ ID NO: 803042 - RNA, 20 nt, Artificial Sequence
  Synthetic
uauaggccaagcugcagaag

SEQ ID NO: 803043 - RNA, 20 nt, Artificial Sequence
  Synthetic
uugucacaugaggucagaag

SEQ ID NO: 803044 - RNA, 20 nt, Artificial Sequence
  Synthetic
ugcauguguauggucagaag

SEQ ID NO: 803045 - RNA, 20 nt, Artificial Sequence
  Synthetic
acuugcuuugcauucagaag

SEQ ID NO: 803046 - RNA, 20 nt, Artificial Sequence
  Synthetic
ucuucacuuuuauucagaag

SEQ ID NO: 803047 - RNA, 20 nt, Artificial Sequence
  Synthetic
aggggagugaaaaagagaag

SEQ ID NO: 803048 - RNA, 20 nt, Artificial Sequence
  Synthetic
cuuuagucauccaagagaag

SEQ ID NO: 803049 - RNA, 20 nt, Artificial Sequence
  Synthetic
aaguguaggugcaagagaag

SEQ ID NO: 803050 - RNA, 20 nt, Artificial Sequence
  Synthetic
uuugcaguacucaagagaag

SEQ ID NO: 803051 - RNA, 20 nt, Artificial Sequence
  Synthetic
uaauuauccauuaagagaag

SEQ ID NO: 803052 - RNA, 20 nt, Artificial Sequence
  Synthetic
ugccaagacagagagagaag

SEQ ID NO: 803053 - RNA, 20 nt, Artificial Sequence
  Synthetic
acaguggggcuagagagaag

SEQ ID NO: 803054 - RNA, 20 nt, Artificial Sequence
  Synthetic
ccauggcaacucuagagaag

SEQ ID NO: 803055 - RNA, 20 nt, Artificial Sequence
  Synthetic
agaaaaaaaauguagagaag

SEQ ID NO: 803056 - RNA, 20 nt, Artificial Sequence
  Synthetic
cugcugacgcuguagagaag

SEQ ID NO: 803057 - RNA, 20 nt, Artificial Sequence
  Synthetic
cugguaaugcuuucgagaag

SEQ ID NO: 803058 - RNA, 20 nt, Artificial Sequence
  Synthetic
agauuggagagcaggagaag

SEQ ID NO: 803059 - RNA, 20 nt, Artificial Sequence
  Synthetic
uugaaagugaggaggagaag

SEQ ID NO: 803060 - RNA, 20 nt, Artificial Sequence
  Synthetic
ucuagaauuuggaggagaag

SEQ ID NO: 803061 - RNA, 20 nt, Artificial Sequence
  Synthetic
aaccaagauuaagggagaag

SEQ ID NO: 803062 - RNA, 20 nt, Artificial Sequence
  Synthetic
uuuucuuaaauugggagaag

SEQ ID NO: 803063 - RNA, 20 nt, Artificial Sequence
  Synthetic
uccuacccacaauggagaag

SEQ ID NO: 803064 - RNA, 20 nt, Artificial Sequence
  Synthetic
caagcuauacacuggagaag

SEQ ID NO: 803065 - RNA, 20 nt, Artificial Sequence
  Synthetic
uuuauauuauucuggagaag

SEQ ID NO: 803066 - RNA, 20 nt, Artificial Sequence
  Synthetic
augagaaccagaaugagaag

SEQ ID NO: 803067 - RNA, 20 nt, Artificial Sequence
  Synthetic
uaaaguucguagaugagaag

SEQ ID NO: 803068 - RNA, 20 nt, Artificial Sequence
  Synthetic
ucauggaauuagaugagaag

SEQ ID NO: 803069 - RNA, 20 nt, Artificial Sequence
  Synthetic
ccuagcggagcuaugagaag

SEQ ID NO: 803070 - RNA, 20 nt, Artificial Sequence
  Synthetic
aguuaguagaaucugagaag

SEQ ID NO: 803071 - RNA, 20 nt, Artificial Sequence
  Synthetic
ccuaguagagcugugagaag

SEQ ID NO: 803072 - RNA, 20 nt, Artificial Sequence
  Synthetic
ccuaguggagcugugagaag

SEQ ID NO: 803073 - RNA, 20 nt, Artificial Sequence
  Synthetic
cuagaguggguauugagaag

SEQ ID NO: 803074 - RNA, 20 nt, Artificial Sequence
  Synthetic
aauauuaauaacuugagaag

SEQ ID NO: 803075 - RNA, 20 nt, Artificial Sequence
  Synthetic
cauuuaaggaauuugagaag

SEQ ID NO: 803076 - RNA, 20 nt, Artificial Sequence
  Synthetic
ugaaaucagauuuugagaag

SEQ ID NO: 803077 - RNA, 20 nt, Artificial Sequence
  Synthetic
caugauuaucucaauagaag

SEQ ID NO: 803078 - RNA, 20 nt, Artificial Sequence
  Synthetic
aguacaauacugaauagaag

SEQ ID NO: 803079 - RNA, 20 nt, Artificial Sequence
  Synthetic
aaacuagggacuaauagaag

SEQ ID NO: 803080 - RNA, 20 nt, Artificial Sequence
  Synthetic
uuguuaccucuuaauagaag

SEQ ID NO: 803081 - RNA, 20 nt, Artificial Sequence
  Synthetic
agaaagcuggcacauagaag

SEQ ID NO: 803082 - RNA, 20 nt, Artificial Sequence
  Synthetic
auggcuuugagacauagaag

SEQ ID NO: 803083 - RNA, 20 nt, Artificial Sequence
  Synthetic
uuaacuacuuuucauagaag

SEQ ID NO: 803084 - RNA, 20 nt, Artificial Sequence
  Synthetic
aaaaaaaauaucuauagaag

SEQ ID NO: 803085 - RNA, 20 nt, Artificial Sequence
  Synthetic
acagaggggaacacuagaag

SEQ ID NO: 803086 - RNA, 20 nt, Artificial Sequence
  Synthetic
uagauguuaggcacuagaag

SEQ ID NO: 803087 - RNA, 20 nt, Artificial Sequence
  Synthetic
acuagaguuuggacuagaag

SEQ ID NO: 803088 - RNA, 20 nt, Artificial Sequence
  Synthetic
acauuggggacuacuagaag

SEQ ID NO: 803089 - RNA, 20 nt, Artificial Sequence
  Synthetic
cauaugagaacaccuagaag

SEQ ID NO: 803090 - RNA, 20 nt, Artificial Sequence
  Synthetic
acacagaagucugcuagaag

SEQ ID NO: 803091 - RNA, 20 nt, Artificial Sequence
  Synthetic
ugaggaauacagaguagaag

SEQ ID NO: 803092 - RNA, 20 nt, Artificial Sequence
  Synthetic
acauaucugaguaguagaag

SEQ ID NO: 803093 - RNA, 20 nt, Artificial Sequence
  Synthetic
aggguagaguguaguagaag

SEQ ID NO: 803094 - RNA, 20 nt, Artificial Sequence
  Synthetic
uaaugcuaugaggguagaag

SEQ ID NO: 803095 - RNA, 20 nt, Artificial Sequence
  Synthetic
uuugaguaacucuguagaag

SEQ ID NO: 803096 - RNA, 20 nt, Artificial Sequence
  Synthetic
auuucuuccucaauuagaag

SEQ ID NO: 803097 - RNA, 20 nt, Artificial Sequence
  Synthetic
auauuguauaguauuagaag

SEQ ID NO: 803098 - RNA, 20 nt, Artificial Sequence
  Synthetic
cugaacaggacaguuagaag

SEQ ID NO: 803099 - RNA, 20 nt, Artificial Sequence
  Synthetic
aaauuccugaaguuuagaag

SEQ ID NO: 803100 - RNA, 20 nt, Artificial Sequence
  Synthetic
agaauaaauaucuuacgaag

SEQ ID NO: 803101 - RNA, 20 nt, Artificial Sequence
  Synthetic
acgacaacaacaaaccgaag

SEQ ID NO: 803102 - RNA, 20 nt, Artificial Sequence
  Synthetic
aaaaaaaaaaaaacccgaag

SEQ ID NO: 803103 - RNA, 20 nt, Artificial Sequence
  Synthetic
aacacuuugggaggccgaag

SEQ ID NO: 803104 - RNA, 20 nt, Artificial Sequence
  Synthetic
agcacuuugggaggccgaag

SEQ ID NO: 803105 - RNA, 20 nt, Artificial Sequence
  Synthetic
aaaucagccauucuccgaag

SEQ ID NO: 803106 - RNA, 20 nt, Artificial Sequence
  Synthetic
uaaccaggggcugggcgaag

SEQ ID NO: 803107 - RNA, 20 nt, Artificial Sequence
  Synthetic
aaaaaaaaaaaaaaaggaag

SEQ ID NO: 803108 - RNA, 20 nt, Artificial Sequence
  Synthetic
uacacauggagaaaaggaag

SEQ ID NO: 803109 - RNA, 20 nt, Artificial Sequence
  Synthetic
aagucucaaagacaaggaag

SEQ ID NO: 803110 - RNA, 20 nt, Artificial Sequence
  Synthetic
uuccaugaaagccaaggaag

SEQ ID NO: 803111 - RNA, 20 nt, Artificial Sequence
  Synthetic
ucuuugccaagccaaggaag

SEQ ID NO: 803112 - RNA, 20 nt, Artificial Sequence
  Synthetic
caucauuagaagcaaggaag

SEQ ID NO: 803113 - RNA, 20 nt, Artificial Sequence
  Synthetic
accagccauaaauaaggaag

SEQ ID NO: 803114 - RNA, 20 nt, Artificial Sequence
  Synthetic
uaggggaagagauaaggaag

SEQ ID NO: 803115 - RNA, 20 nt, Artificial Sequence
  Synthetic
uuguauaagggguaaggaag

SEQ ID NO: 803116 - RNA, 20 nt, Artificial Sequence
  Synthetic
uaaaacgcaguguaaggaag

SEQ ID NO: 803117 - RNA, 20 nt, Artificial Sequence
  Synthetic
uuguauaagguguaaggaag

SEQ ID NO: 803118 - RNA, 20 nt, Artificial Sequence
  Synthetic
ccaucauauuguuaaggaag

SEQ ID NO: 803119 - RNA, 20 nt, Artificial Sequence
  Synthetic
cgauuuuuaaagacaggaag

SEQ ID NO: 803120 - RNA, 20 nt, Artificial Sequence
  Synthetic
uaccacaugaauacaggaag

SEQ ID NO: 803121 - RNA, 20 nt, Artificial Sequence
  Synthetic
uuguggagaucaccaggaag

SEQ ID NO: 803122 - RNA, 20 nt, Artificial Sequence
  Synthetic
aaagaaauuguaccaggaag

SEQ ID NO: 803123 - RNA, 20 nt, Artificial Sequence
  Synthetic
aaucacuugaccccaggaag

SEQ ID NO: 803124 - RNA, 20 nt, Artificial Sequence
  Synthetic
cugugaaagcagccaggaag

SEQ ID NO: 803125 - RNA, 20 nt, Artificial Sequence
  Synthetic
cuuugcuaacacucaggaag

SEQ ID NO: 803126 - RNA, 20 nt, Artificial Sequence
  Synthetic
auuguaagcagaagaggaag

SEQ ID NO: 803127 - RNA, 20 nt, Artificial Sequence
  Synthetic
uuuuuuaauauaagaggaag

SEQ ID NO: 803128 - RNA, 20 nt, Artificial Sequence
  Synthetic
cucucuagucucagaggaag

SEQ ID NO: 803129 - RNA, 20 nt, Artificial Sequence
  Synthetic
aaaaucaaguggagaggaag

SEQ ID NO: 803130 - RNA, 20 nt, Artificial Sequence
  Synthetic
uggagucuacauagaggaag

SEQ ID NO: 803131 - RNA, 20 nt, Artificial Sequence
  Synthetic
uguguagaugggggaggaag

SEQ ID NO: 803132 - RNA, 20 nt, Artificial Sequence
  Synthetic
ugacugugaaaaugaggaag

SEQ ID NO: 803133 - RNA, 20 nt, Artificial Sequence
  Synthetic
uuagaugaugcaauaggaag

SEQ ID NO: 803134 - RNA, 20 nt, Artificial Sequence
  Synthetic
auacugccuauaguaggaag

SEQ ID NO: 803135 - RNA, 20 nt, Artificial Sequence
  Synthetic
aaaaagacucagguaggaag

SEQ ID NO: 803136 - RNA, 20 nt, Artificial Sequence
  Synthetic
aggcugcaagguguaggaag

SEQ ID NO: 803137 - RNA, 20 nt, Artificial Sequence
  Synthetic
ucuauaagguaauuaggaag

SEQ ID NO: 803138 - RNA, 20 nt, Artificial Sequence
  Synthetic
aaggugaugacauuaggaag

SEQ ID NO: 803139 - RNA, 20 nt, Artificial Sequence
  Synthetic
cuuggagcauggcacggaag

SEQ ID NO: 803140 - RNA, 20 nt, Artificial Sequence
  Synthetic
uaagagcucaguuacggaag

SEQ ID NO: 803141 - RNA, 20 nt, Artificial Sequence
  Synthetic
uaaccucagaguuacggaag

SEQ ID NO: 803142 - RNA, 20 nt, Artificial Sequence
  Synthetic
uuuggauauauacccggaag

SEQ ID NO: 803143 - RNA, 20 nt, Artificial Sequence
  Synthetic
uaaccaaaggccuccggaag

SEQ ID NO: 803144 - RNA, 20 nt, Artificial Sequence
  Synthetic
agugcuuauguuuucggaag

SEQ ID NO: 803145 - RNA, 20 nt, Artificial Sequence
  Synthetic
uaaaacuaggguaagggaag

SEQ ID NO: 803146 - RNA, 20 nt, Artificial Sequence
  Synthetic
uacuuuuuccuacagggaag

SEQ ID NO: 803147 - RNA, 20 nt, Artificial Sequence
  Synthetic
aauauuagcugccagggaag

SEQ ID NO: 803148 - RNA, 20 nt, Artificial Sequence
  Synthetic
aaugcuccaggagagggaag

SEQ ID NO: 803149 - RNA, 20 nt, Artificial Sequence
  Synthetic
agaaugagugaggagggaag

SEQ ID NO: 803150 - RNA, 20 nt, Artificial Sequence
  Synthetic
uaaguaacuccggagggaag

SEQ ID NO: 803151 - RNA, 20 nt, Artificial Sequence
  Synthetic
aguauguuuugggagggaag

SEQ ID NO: 803152 - RNA, 20 nt, Artificial Sequence
  Synthetic
ugugauuuaaaauagggaag

SEQ ID NO: 803153 - RNA, 20 nt, Artificial Sequence
  Synthetic
aagcugaaguaaccgggaag

SEQ ID NO: 803154 - RNA, 20 nt, Artificial Sequence
  Synthetic
uggguauugagaaggggaag

SEQ ID NO: 803155 - RNA, 20 nt, Artificial Sequence
  Synthetic
aaguggagaggaaggggaag

SEQ ID NO: 803156 - RNA, 20 nt, Artificial Sequence
  Synthetic
uucuuccuuaauaggggaag

SEQ ID NO: 803157 - RNA, 20 nt, Artificial Sequence
  Synthetic
ugcugugggguggggggaag

SEQ ID NO: 803158 - RNA, 20 nt, Artificial Sequence
  Synthetic
cuguuguggggugggggaag

SEQ ID NO: 803159 - RNA, 20 nt, Artificial Sequence
  Synthetic
aaaagaaagguauggggaag

SEQ ID NO: 803160 - RNA, 20 nt, Artificial Sequence
  Synthetic
caggugaaaaccuggggaag

SEQ ID NO: 803161 - RNA, 20 nt, Artificial Sequence
  Synthetic
auagaugagggcuggggaag

SEQ ID NO: 803162 - RNA, 20 nt, Artificial Sequence
  Synthetic
caaaagcagugcuggggaag

SEQ ID NO: 803163 - RNA, 20 nt, Artificial Sequence
  Synthetic
aaucaggaacucuggggaag

SEQ ID NO: 803164 - RNA, 20 nt, Artificial Sequence
  Synthetic
ccaaagggagagaugggaag

SEQ ID NO: 803165 - RNA, 20 nt, Artificial Sequence
  Synthetic
aaguggcucucagugggaag

SEQ ID NO: 803166 - RNA, 20 nt, Artificial Sequence
  Synthetic
augguaacuggagugggaag

SEQ ID NO: 803167 - RNA, 20 nt, Artificial Sequence
  Synthetic
aaggagacgcauuugggaag

SEQ ID NO: 803168 - RNA, 20 nt, Artificial Sequence
  Synthetic
cagauuuaaucaaauggaag

SEQ ID NO: 803169 - RNA, 20 nt, Artificial Sequence
  Synthetic
aggaaaggaggaaauggaag

SEQ ID NO: 803170 - RNA, 20 nt, Artificial Sequence
  Synthetic
ccuugagauggcaauggaag

SEQ ID NO: 803171 - RNA, 20 nt, Artificial Sequence
  Synthetic
acucagggacagcauggaag

SEQ ID NO: 803172 - RNA, 20 nt, Artificial Sequence
  Synthetic
agauaauugaaucauggaag

SEQ ID NO: 803173 - RNA, 20 nt, Artificial Sequence
  Synthetic
caauuagaagaggauggaag

SEQ ID NO: 803174 - RNA, 20 nt, Artificial Sequence
  Synthetic
agccauacuuauuauggaag

SEQ ID NO: 803175 - RNA, 20 nt, Artificial Sequence
  Synthetic
cagagagaagacacuggaag

SEQ ID NO: 803176 - RNA, 20 nt, Artificial Sequence
  Synthetic
accagcuaucaagcuggaag

SEQ ID NO: 803177 - RNA, 20 nt, Artificial Sequence
  Synthetic
ucacaugcugaaucuggaag

SEQ ID NO: 803178 - RNA, 20 nt, Artificial Sequence
  Synthetic
aaauaaaguacaucuggaag

SEQ ID NO: 803179 - RNA, 20 nt, Artificial Sequence
  Synthetic
uuuggugugugcucuggaag

SEQ ID NO: 803180 - RNA, 20 nt, Artificial Sequence
  Synthetic
cucaguuacggaaguggaag

SEQ ID NO: 803181 - RNA, 20 nt, Artificial Sequence
  Synthetic
aggagauagguaaguggaag

SEQ ID NO: 803182 - RNA, 20 nt, Artificial Sequence
  Synthetic
uacuauuaauuaaguggaag

SEQ ID NO: 803183 - RNA, 20 nt, Artificial Sequence
  Synthetic
aagcuuccacaacguggaag

SEQ ID NO: 803184 - RNA, 20 nt, Artificial Sequence
  Synthetic
auauuccaacgagguggaag

SEQ ID NO: 803185 - RNA, 20 nt, Artificial Sequence
  Synthetic
aauugcaauucugguggaag

SEQ ID NO: 803186 - RNA, 20 nt, Artificial Sequence
  Synthetic
ugggggacagcauguggaag

SEQ ID NO: 803187 - RNA, 20 nt, Artificial Sequence
  Synthetic
aaucauauacauuguggaag

SEQ ID NO: 803188 - RNA, 20 nt, Artificial Sequence
  Synthetic
ugcugaaaacucauuggaag

SEQ ID NO: 803189 - RNA, 20 nt, Artificial Sequence
  Synthetic
ugcuggaguuguauuggaag

SEQ ID NO: 803190 - RNA, 20 nt, Artificial Sequence
  Synthetic
acauucaaagagguuggaag

SEQ ID NO: 803191 - RNA, 20 nt, Artificial Sequence
  Synthetic
cagcucgaagagguuggaag

SEQ ID NO: 803192 - RNA, 20 nt, Artificial Sequence
  Synthetic
caacaacagcauguuggaag

SEQ ID NO: 803193 - RNA, 20 nt, Artificial Sequence
  Synthetic
auucugaacguguuuggaag

SEQ ID NO: 803194 - RNA, 20 nt, Artificial Sequence
  Synthetic
agaagaaagaaaaaaugaag

SEQ ID NO: 803195 - RNA, 20 nt, Artificial Sequence
  Synthetic
agaaauuagccaaaaugaag

SEQ ID NO: 803196 - RNA, 20 nt, Artificial Sequence
  Synthetic
aaucauggcagaaaaugaag

SEQ ID NO: 803197 - RNA, 20 nt, Artificial Sequence
  Synthetic
uggugcaguaugaaaugaag

SEQ ID NO: 803198 - RNA, 20 nt, Artificial Sequence
  Synthetic
ugcaaaaaccuugaaugaag

SEQ ID NO: 803199 - RNA, 20 nt, Artificial Sequence
  Synthetic
uuggagccccuugaaugaag

SEQ ID NO: 803200 - RNA, 20 nt, Artificial Sequence
  Synthetic
aaguaaauagaauaaugaag

SEQ ID NO: 803201 - RNA, 20 nt, Artificial Sequence
  Synthetic
uugcugacaacauaaugaag

SEQ ID NO: 803202 - RNA, 20 nt, Artificial Sequence
  Synthetic
aauucaacaaguuaaugaag

SEQ ID NO: 803203 - RNA, 20 nt, Artificial Sequence
  Synthetic
agugaagcacuuuaaugaag

SEQ ID NO: 803204 - RNA, 20 nt, Artificial Sequence
  Synthetic
acuauauaguccacaugaag

SEQ ID NO: 803205 - RNA, 20 nt, Artificial Sequence
  Synthetic
ucugaugcucucacaugaag

SEQ ID NO: 803206 - RNA, 20 nt, Artificial Sequence
  Synthetic
ugacuggagaagacaugaag

SEQ ID NO: 803207 - RNA, 20 nt, Artificial Sequence
  Synthetic
agugcagugaucccaugaag

SEQ ID NO: 803208 - RNA, 20 nt, Artificial Sequence
  Synthetic
agcguuuaggggccaugaag

SEQ ID NO: 803209 - RNA, 20 nt, Artificial Sequence
  Synthetic
agcuaccucaauccaugaag

SEQ ID NO: 803210 - RNA, 20 nt, Artificial Sequence
  Synthetic
ugagaguuuuuagcaugaag

SEQ ID NO: 803211 - RNA, 20 nt, Artificial Sequence
  Synthetic
cuuugcguaaaaucaugaag

SEQ ID NO: 803212 - RNA, 20 nt, Artificial Sequence
  Synthetic
auugguagcaaaagaugaag

SEQ ID NO: 803213 - RNA, 20 nt, Artificial Sequence
  Synthetic
uuaacacuuguaagaugaag

SEQ ID NO: 803214 - RNA, 20 nt, Artificial Sequence
  Synthetic
aggauuucagacagaugaag

SEQ ID NO: 803215 - RNA, 20 nt, Artificial Sequence
  Synthetic
uuuuauaauagaggaugaag

SEQ ID NO: 803216 - RNA, 20 nt, Artificial Sequence
  Synthetic
caauguuuuggaggaugaag

SEQ ID NO: 803217 - RNA, 20 nt, Artificial Sequence
  Synthetic
aaauacaaagaaauaugaag

SEQ ID NO: 803218 - RNA, 20 nt, Artificial Sequence
  Synthetic
agggaggccaauauaugaag

SEQ ID NO: 803219 - RNA, 20 nt, Artificial Sequence
  Synthetic
ucucuauacaaguuaugaag

SEQ ID NO: 803220 - RNA, 20 nt, Artificial Sequence
  Synthetic
ccuucuaucaacaacugaag

SEQ ID NO: 803221 - RNA, 20 nt, Artificial Sequence
  Synthetic
acacugaguaagaacugaag

SEQ ID NO: 803222 - RNA, 20 nt, Artificial Sequence
  Synthetic
aggugauauuaacacugaag

SEQ ID NO: 803223 - RNA, 20 nt, Artificial Sequence
  Synthetic
uuucuuuuucuucacugaag

SEQ ID NO: 803224 - RNA, 20 nt, Artificial Sequence
  Synthetic
uacuuguagagugacugaag

SEQ ID NO: 803225 - RNA, 20 nt, Artificial Sequence
  Synthetic
caguacaugugcuacugaag

SEQ ID NO: 803226 - RNA, 20 nt, Artificial Sequence
  Synthetic
caagcaagaaucuacugaag

SEQ ID NO: 803227 - RNA, 20 nt, Artificial Sequence
  Synthetic
acccucacaacaaccugaag

SEQ ID NO: 803228 - RNA, 20 nt, Artificial Sequence
  Synthetic
ugugugcauuguuccugaag

SEQ ID NO: 803229 - RNA, 20 nt, Artificial Sequence
  Synthetic
auagacuacagaagcugaag

SEQ ID NO: 803230 - RNA, 20 nt, Artificial Sequence
  Synthetic
uauucacauuugagcugaag

SEQ ID NO: 803231 - RNA, 20 nt, Artificial Sequence
  Synthetic
uccugggaggcaggcugaag

SEQ ID NO: 803232 - RNA, 20 nt, Artificial Sequence
  Synthetic
ccuuuaaguagaggcugaag

SEQ ID NO: 803233 - RNA, 20 nt, Artificial Sequence
  Synthetic
agcacuuugggaggcugaag

SEQ ID NO: 803234 - RNA, 20 nt, Artificial Sequence
  Synthetic
caggcugaugggugcugaag

SEQ ID NO: 803235 - RNA, 20 nt, Artificial Sequence
  Synthetic
cugauucaacaguucugaag

SEQ ID NO: 803236 - RNA, 20 nt, Artificial Sequence
  Synthetic
agugaaaaagaaaagugaag

SEQ ID NO: 803237 - RNA, 20 nt, Artificial Sequence
  Synthetic
uauuagccaugaaagugaag

SEQ ID NO: 803238 - RNA, 20 nt, Artificial Sequence
  Synthetic
uagcuagcugcccagugaag

SEQ ID NO: 803239 - RNA, 20 nt, Artificial Sequence
  Synthetic
uaccuugcauagcagugaag

SEQ ID NO: 803240 - RNA, 20 nt, Artificial Sequence
  Synthetic
aaccaguuuuaggagugaag

SEQ ID NO: 803241 - RNA, 20 nt, Artificial Sequence
  Synthetic
uccccuaggcuggagugaag

SEQ ID NO: 803242 - RNA, 20 nt, Artificial Sequence
  Synthetic
ccccccagaguugagugaag

SEQ ID NO: 803243 - RNA, 20 nt, Artificial Sequence
  Synthetic
agacagaaaaacuagugaag

SEQ ID NO: 803244 - RNA, 20 nt, Artificial Sequence
  Synthetic
uugagaauauucuagugaag

SEQ ID NO: 803245 - RNA, 20 nt, Artificial Sequence
  Synthetic
aucaaauucuguuagugaag

SEQ ID NO: 803246 - RNA, 20 nt, Artificial Sequence
  Synthetic
uaagagccaagaaggugaag

SEQ ID NO: 803247 - RNA, 20 nt, Artificial Sequence
  Synthetic
aaucauggcagaaggugaag

SEQ ID NO: 803248 - RNA, 20 nt, Artificial Sequence
  Synthetic
aaucaugguggaaggugaag

SEQ ID NO: 803249 - RNA, 20 nt, Artificial Sequence
  Synthetic
ccaaaauucagaaugugaag

SEQ ID NO: 803250 - RNA, 20 nt, Artificial Sequence
  Synthetic
uuuguugauacuaugugaag

SEQ ID NO: 803251 - RNA, 20 nt, Artificial Sequence
  Synthetic
cagauuuaacuacugugaag

SEQ ID NO: 803252 - RNA, 20 nt, Artificial Sequence
  Synthetic
caagaaguuuuacugugaag

SEQ ID NO: 803253 - RNA, 20 nt, Artificial Sequence
  Synthetic
uucaaaguacaccugugaag

SEQ ID NO: 803254 - RNA, 20 nt, Artificial Sequence
  Synthetic
ccuccugccacccugugaag

SEQ ID NO: 803255 - RNA, 20 nt, Artificial Sequence
  Synthetic
acuuuugucccagugugaag

SEQ ID NO: 803256 - RNA, 20 nt, Artificial Sequence
  Synthetic
aucuguuaacuuuugugaag

SEQ ID NO: 803257 - RNA, 20 nt, Artificial Sequence
  Synthetic
auagagaauuuaaauugaag

SEQ ID NO: 803258 - RNA, 20 nt, Artificial Sequence
  Synthetic
acaggaacuucacauugaag

SEQ ID NO: 803259 - RNA, 20 nt, Artificial Sequence
  Synthetic
auguaaauuuggcauugaag

SEQ ID NO: 803260 - RNA, 20 nt, Artificial Sequence
  Synthetic
uggcccuauauugauugaag

SEQ ID NO: 803261 - RNA, 20 nt, Artificial Sequence
  Synthetic
uaguaaaugugaccuugaag

SEQ ID NO: 803262 - RNA, 20 nt, Artificial Sequence
  Synthetic
uugugaauacauucuugaag

SEQ ID NO: 803263 - RNA, 20 nt, Artificial Sequence
  Synthetic
uuuuguuuucuuucuugaag

SEQ ID NO: 803264 - RNA, 20 nt, Artificial Sequence
  Synthetic
ucaucaaguaaaaguugaag

SEQ ID NO: 803265 - RNA, 20 nt, Artificial Sequence
  Synthetic
caguugagacccaguugaag

SEQ ID NO: 803266 - RNA, 20 nt, Artificial Sequence
  Synthetic
uaaaugauagucaguugaag

SEQ ID NO: 803267 - RNA, 20 nt, Artificial Sequence
  Synthetic
ucagaauaaucuaguugaag

SEQ ID NO: 803268 - RNA, 20 nt, Artificial Sequence
  Synthetic
acauuuguaugggguugaag

SEQ ID NO: 803269 - RNA, 20 nt, Artificial Sequence
  Synthetic
cucugccuccuggguugaag

SEQ ID NO: 803270 - RNA, 20 nt, Artificial Sequence
  Synthetic
cccagcaccauugguugaag

SEQ ID NO: 803271 - RNA, 20 nt, Artificial Sequence
  Synthetic
uuuuauuuaucaauuugaag

SEQ ID NO: 803272 - RNA, 20 nt, Artificial Sequence
  Synthetic
acaagagucuuucuuugaag

SEQ ID NO: 803273 - RNA, 20 nt, Artificial Sequence
  Synthetic
cugauucaacaguuuugaag

SEQ ID NO: 803274 - RNA, 20 nt, Artificial Sequence
  Synthetic
cuucauugacuuuuuugaag

SEQ ID NO: 803275 - RNA, 20 nt, Artificial Sequence
  Synthetic
auuuugggaaaaaaaauaag

SEQ ID NO: 803276 - RNA, 20 nt, Artificial Sequence
  Synthetic
uugcuuaagagggaaauaag

SEQ ID NO: 803277 - RNA, 20 nt, Artificial Sequence
  Synthetic
caguucuaaguggaaauaag

SEQ ID NO: 803278 - RNA, 20 nt, Artificial Sequence
  Synthetic
cauaacuuuugugaaauaag

SEQ ID NO: 803279 - RNA, 20 nt, Artificial Sequence
  Synthetic
aacaaugucaacuaaauaag

SEQ ID NO: 803280 - RNA, 20 nt, Artificial Sequence
  Synthetic
uuaaaaacaaccuaaauaag

SEQ ID NO: 803281 - RNA, 20 nt, Artificial Sequence
  Synthetic
ugccugggugaguaaauaag

SEQ ID NO: 803282 - RNA, 20 nt, Artificial Sequence
  Synthetic
cacuaagagauuuaaauaag

SEQ ID NO: 803283 - RNA, 20 nt, Artificial Sequence
  Synthetic
uuagugaugcauucaauaag

SEQ ID NO: 803284 - RNA, 20 nt, Artificial Sequence
  Synthetic
aucaaaauuuggagaauaag

SEQ ID NO: 803285 - RNA, 20 nt, Artificial Sequence
  Synthetic
uuuaauaauauuggaauaag

SEQ ID NO: 803286 - RNA, 20 nt, Artificial Sequence
  Synthetic
uggauggguagaugaauaag

SEQ ID NO: 803287 - RNA, 20 nt, Artificial Sequence
  Synthetic
aguugaggaaacugaauaag

SEQ ID NO: 803288 - RNA, 20 nt, Artificial Sequence
  Synthetic
cgguggcuguggugaauaag

SEQ ID NO: 803289 - RNA, 20 nt, Artificial Sequence
  Synthetic
aguugaaguagaauaauaag

SEQ ID NO: 803290 - RNA, 20 nt, Artificial Sequence
  Synthetic
cuaugagagcauauaauaag

SEQ ID NO: 803291 - RNA, 20 nt, Artificial Sequence
  Synthetic
agggcuuuucuuauaauaag

SEQ ID NO: 803292 - RNA, 20 nt, Artificial Sequence
  Synthetic
acagccauacuccuaauaag

SEQ ID NO: 803293 - RNA, 20 nt, Artificial Sequence
  Synthetic
uaggaucacaugguaauaag

SEQ ID NO: 803294 - RNA, 20 nt, Artificial Sequence
  Synthetic
uauuuaaagccccacauaag

SEQ ID NO: 803295 - RNA, 20 nt, Artificial Sequence
  Synthetic
uaauuuggaagccacauaag

SEQ ID NO: 803296 - RNA, 20 nt, Artificial Sequence
  Synthetic
uacuuuuccuuagacauaag

SEQ ID NO: 803297 - RNA, 20 nt, Artificial Sequence
  Synthetic
accaaaaaaugcuacauaag

SEQ ID NO: 803298 - RNA, 20 nt, Artificial Sequence
  Synthetic
uuuauaugauauaccauaag

SEQ ID NO: 803299 - RNA, 20 nt, Artificial Sequence
  Synthetic
cacauauucucacccauaag

SEQ ID NO: 803300 - RNA, 20 nt, Artificial Sequence
  Synthetic
ucaacuuccacauccauaag

SEQ ID NO: 803301 - RNA, 20 nt, Artificial Sequence
  Synthetic
uuugcccucacauccauaag

SEQ ID NO: 803302 - RNA, 20 nt, Artificial Sequence
  Synthetic
ucaacugaccaaagcauaag

SEQ ID NO: 803303 - RNA, 20 nt, Artificial Sequence
  Synthetic
aucauuagcauaagcauaag

SEQ ID NO: 803304 - RNA, 20 nt, Artificial Sequence
  Synthetic
ugaaugguuaaaugcauaag

SEQ ID NO: 803305 - RNA, 20 nt, Artificial Sequence
  Synthetic
caccccuacucuugcauaag

SEQ ID NO: 803306 - RNA, 20 nt, Artificial Sequence
  Synthetic
aaauuaaauucuugcauaag

SEQ ID NO: 803307 - RNA, 20 nt, Artificial Sequence
  Synthetic
uuuauaaauaaacucauaag

SEQ ID NO: 803308 - RNA, 20 nt, Artificial Sequence
  Synthetic
ugcauggucucacucauaag

SEQ ID NO: 803309 - RNA, 20 nt, Artificial Sequence
  Synthetic
cgcauguucucacucauaag

SEQ ID NO: 803310 - RNA, 20 nt, Artificial Sequence
  Synthetic
agagcugaugguuucauaag

SEQ ID NO: 803311 - RNA, 20 nt, Artificial Sequence
  Synthetic
auguauccccuacagauaag

SEQ ID NO: 803312 - RNA, 20 nt, Artificial Sequence
  Synthetic
cugaagaaaauagagauaag

SEQ ID NO: 803313 - RNA, 20 nt, Artificial Sequence
  Synthetic
uagucacaggaugagauaag

SEQ ID NO: 803314 - RNA, 20 nt, Artificial Sequence
  Synthetic
aggcgaaaaaacucgauaag

SEQ ID NO: 803315 - RNA, 20 nt, Artificial Sequence
  Synthetic
uccuuguacuucaggauaag

SEQ ID NO: 803316 - RNA, 20 nt, Artificial Sequence
  Synthetic
agugacugcaaagggauaag

SEQ ID NO: 803317 - RNA, 20 nt, Artificial Sequence
  Synthetic
uucuggaugaauuggauaag

SEQ ID NO: 803318 - RNA, 20 nt, Artificial Sequence
  Synthetic
acaauauccauuaugauaag

SEQ ID NO: 803319 - RNA, 20 nt, Artificial Sequence
  Synthetic
uugguaagaguuaugauaag

SEQ ID NO: 803320 - RNA, 20 nt, Artificial Sequence
  Synthetic
uuuuuuucucaucugauaag

SEQ ID NO: 803321 - RNA, 20 nt, Artificial Sequence
  Synthetic
cccuaaucaaguuugauaag

SEQ ID NO: 803322 - RNA, 20 nt, Artificial Sequence
  Synthetic
uuaaaaucucauaauauaag

SEQ ID NO: 803323 - RNA, 20 nt, Artificial Sequence
  Synthetic
ucuuaaauggaagauauaag

SEQ ID NO: 803324 - RNA, 20 nt, Artificial Sequence
  Synthetic
uugaaaagucuagauauaag

SEQ ID NO: 803325 - RNA, 20 nt, Artificial Sequence
  Synthetic
auuaaugcacaauauauaag

SEQ ID NO: 803326 - RNA, 20 nt, Artificial Sequence
  Synthetic
aacucuuauacauauauaag

SEQ ID NO: 803327 - RNA, 20 nt, Artificial Sequence
  Synthetic
aaaaacuucuaggcuauaag

SEQ ID NO: 803328 - RNA, 20 nt, Artificial Sequence
  Synthetic
uugagauugucaaguauaag

SEQ ID NO: 803329 - RNA, 20 nt, Artificial Sequence
  Synthetic
aaaaagucuuggaguauaag

SEQ ID NO: 803330 - RNA, 20 nt, Artificial Sequence
  Synthetic
uccuccuaaguagguauaag

SEQ ID NO: 803331 - RNA, 20 nt, Artificial Sequence
  Synthetic
aacuggaguauugguauaag

SEQ ID NO: 803332 - RNA, 20 nt, Artificial Sequence
  Synthetic
aacauuuuugaguguauaag

SEQ ID NO: 803333 - RNA, 20 nt, Artificial Sequence
  Synthetic
ugaguugauucuuguauaag

SEQ ID NO: 803334 - RNA, 20 nt, Artificial Sequence
  Synthetic
ugaguugauuuuuguauaag

SEQ ID NO: 803335 - RNA, 20 nt, Artificial Sequence
  Synthetic
aauaauaugcacauuauaag

SEQ ID NO: 803336 - RNA, 20 nt, Artificial Sequence
  Synthetic
cucaugcaccucauuauaag

SEQ ID NO: 803337 - RNA, 20 nt, Artificial Sequence
  Synthetic
cauauauucucacuuauaag

SEQ ID NO: 803338 - RNA, 20 nt, Artificial Sequence
  Synthetic
uauauguucucacuuauaag

SEQ ID NO: 803339 - RNA, 20 nt, Artificial Sequence
  Synthetic
uguauguucucacuuauaag

SEQ ID NO: 803340 - RNA, 20 nt, Artificial Sequence
  Synthetic
acuuuguucucacuuauaag

SEQ ID NO: 803341 - RNA, 20 nt, Artificial Sequence
  Synthetic
uguucucacuuacuuauaag

SEQ ID NO: 803342 - RNA, 20 nt, Artificial Sequence
  Synthetic
cccauguucucauuuauaag

SEQ ID NO: 803343 - RNA, 20 nt, Artificial Sequence
  Synthetic
aauauucuaauguuuauaag

SEQ ID NO: 803344 - RNA, 20 nt, Artificial Sequence
  Synthetic
acauugaaggguuuuauaag

SEQ ID NO: 803345 - RNA, 20 nt, Artificial Sequence
  Synthetic
agauccaaugguuuuauaag

SEQ ID NO: 803346 - RNA, 20 nt, Artificial Sequence
  Synthetic
aggucugaugguuuuauaag

SEQ ID NO: 803347 - RNA, 20 nt, Artificial Sequence
  Synthetic
agauuugaugguuuuauaag

SEQ ID NO: 803348 - RNA, 20 nt, Artificial Sequence
  Synthetic
uuuagguaauauaaacuaag

SEQ ID NO: 803349 - RNA, 20 nt, Artificial Sequence
  Synthetic
uucugcuuuauucaacuaag

SEQ ID NO: 803350 - RNA, 20 nt, Artificial Sequence
  Synthetic
cacagauaacagacacuaag

SEQ ID NO: 803351 - RNA, 20 nt, Artificial Sequence
  Synthetic
cccuuguaggagccacuaag

SEQ ID NO: 803352 - RNA, 20 nt, Artificial Sequence
  Synthetic
acugaaucaaaagcacuaag

SEQ ID NO: 803353 - RNA, 20 nt, Artificial Sequence
  Synthetic
ugggucccacugucacuaag

SEQ ID NO: 803354 - RNA, 20 nt, Artificial Sequence
  Synthetic
augacuucccaaagacuaag

SEQ ID NO: 803355 - RNA, 20 nt, Artificial Sequence
  Synthetic
ccuuccuuucaaugacuaag

SEQ ID NO: 803356 - RNA, 20 nt, Artificial Sequence
  Synthetic
aaaaacacccagcuacuaag

SEQ ID NO: 803357 - RNA, 20 nt, Artificial Sequence
  Synthetic
uagagcuccaaaguacuaag

SEQ ID NO: 803358 - RNA, 20 nt, Artificial Sequence
  Synthetic
ccccaaguaaugaaccuaag

SEQ ID NO: 803359 - RNA, 20 nt, Artificial Sequence
  Synthetic
acuccaaccagggaccuaag

SEQ ID NO: 803360 - RNA, 20 nt, Artificial Sequence
  Synthetic
acaggaaguuaauaccuaag

SEQ ID NO: 803361 - RNA, 20 nt, Artificial Sequence
  Synthetic
uaaaagaagacauaccuaag

SEQ ID NO: 803362 - RNA, 20 nt, Artificial Sequence
  Synthetic
uggcugagcugguaccuaag

SEQ ID NO: 803363 - RNA, 20 nt, Artificial Sequence
  Synthetic
augcucucagcaacccuaag

SEQ ID NO: 803364 - RNA, 20 nt, Artificial Sequence
  Synthetic
aucucgaaaagaacccuaag

SEQ ID NO: 803365 - RNA, 20 nt, Artificial Sequence
  Synthetic
uaccuuuugucaccccuaag

SEQ ID NO: 803366 - RNA, 20 nt, Artificial Sequence
  Synthetic
agcuuuuaagucucccuaag

SEQ ID NO: 803367 - RNA, 20 nt, Artificial Sequence
  Synthetic
acuucaauuuuuucccuaag

SEQ ID NO: 803368 - RNA, 20 nt, Artificial Sequence
  Synthetic
aguaaagaaauuauccuaag

SEQ ID NO: 803369 - RNA, 20 nt, Artificial Sequence
  Synthetic
agcuacaggcaggagcuaag

SEQ ID NO: 803370 - RNA, 20 nt, Artificial Sequence
  Synthetic
augaacaaagcugagcuaag

SEQ ID NO: 803371 - RNA, 20 nt, Artificial Sequence
  Synthetic
ugauuacugaguuagcuaag

SEQ ID NO: 803372 - RNA, 20 nt, Artificial Sequence
  Synthetic
uagcauuugaaaccgcuaag

SEQ ID NO: 803373 - RNA, 20 nt, Artificial Sequence
  Synthetic
ucaaggccugaaaggcuaag

SEQ ID NO: 803374 - RNA, 20 nt, Artificial Sequence
  Synthetic
acagcaaaagcaaggcuaag

SEQ ID NO: 803375 - RNA, 20 nt, Artificial Sequence
  Synthetic
ucugaguaugccaggcuaag

SEQ ID NO: 803376 - RNA, 20 nt, Artificial Sequence
  Synthetic
aguuacuggguauggcuaag

SEQ ID NO: 803377 - RNA, 20 nt, Artificial Sequence
  Synthetic
acagcaaaaacagugcuaag

SEQ ID NO: 803378 - RNA, 20 nt, Artificial Sequence
  Synthetic
uaggaaggcugagugcuaag

SEQ ID NO: 803379 - RNA, 20 nt, Artificial Sequence
  Synthetic
uuuaaucgucauuugcuaag

SEQ ID NO: 803380 - RNA, 20 nt, Artificial Sequence
  Synthetic
uuauuuuugagacaucuaag

SEQ ID NO: 803381 - RNA, 20 nt, Artificial Sequence
  Synthetic
agugguuuagaaacucuaag

SEQ ID NO: 803382 - RNA, 20 nt, Artificial Sequence
  Synthetic
uggacuuuggggacucuaag

SEQ ID NO: 803383 - RNA, 20 nt, Artificial Sequence
  Synthetic
cugucaaauuggccucuaag

SEQ ID NO: 803384 - RNA, 20 nt, Artificial Sequence
  Synthetic
auuaacauacuggcucuaag

SEQ ID NO: 803385 - RNA, 20 nt, Artificial Sequence
  Synthetic
aguuucugaauuagucuaag

SEQ ID NO: 803386 - RNA, 20 nt, Artificial Sequence
  Synthetic
cuaugcuuugguauucuaag

SEQ ID NO: 803387 - RNA, 20 nt, Artificial Sequence
  Synthetic
aacaucuuccuuauucuaag

SEQ ID NO: 803388 - RNA, 20 nt, Artificial Sequence
  Synthetic
aguuuuaauaugcuucuaag

SEQ ID NO: 803389 - RNA, 20 nt, Artificial Sequence
  Synthetic
acuugagagacaguucuaag

SEQ ID NO: 803390 - RNA, 20 nt, Artificial Sequence
  Synthetic
aaaaagguagacuuucuaag

SEQ ID NO: 803391 - RNA, 20 nt, Artificial Sequence
  Synthetic
ucccaauauuauuuucuaag

SEQ ID NO: 803392 - RNA, 20 nt, Artificial Sequence
  Synthetic
uagaaaaaacaaaaaguaag

SEQ ID NO: 803393 - RNA, 20 nt, Artificial Sequence
  Synthetic
aauauuacuuuaaaaguaag

SEQ ID NO: 803394 - RNA, 20 nt, Artificial Sequence
  Synthetic
uucauaacuuugaaaguaag

SEQ ID NO: 803395 - RNA, 20 nt, Artificial Sequence
  Synthetic
uggaguuuucagcaaguaag

SEQ ID NO: 803396 - RNA, 20 nt, Artificial Sequence
  Synthetic
uugaaagugaggcaaguaag

SEQ ID NO: 803397 - RNA, 20 nt, Artificial Sequence
  Synthetic
cccacauaaugucaaguaag

SEQ ID NO: 803398 - RNA, 20 nt, Artificial Sequence
  Synthetic
ucugcucagaaagaaguaag

SEQ ID NO: 803399 - RNA, 20 nt, Artificial Sequence
  Synthetic
augagaagugaggaaguaag

SEQ ID NO: 803400 - RNA, 20 nt, Artificial Sequence
  Synthetic
ugguagaauuaggaaguaag

SEQ ID NO: 803401 - RNA, 20 nt, Artificial Sequence
  Synthetic
aagacagcuauugaaguaag

SEQ ID NO: 803402 - RNA, 20 nt, Artificial Sequence
  Synthetic
uccauucuaugcuaaguaag

SEQ ID NO: 803403 - RNA, 20 nt, Artificial Sequence
  Synthetic
auaauggcauuuuaaguaag

SEQ ID NO: 803404 - RNA, 20 nt, Artificial Sequence
  Synthetic
cggcaccaccuggcaguaag

SEQ ID NO: 803405 - RNA, 20 nt, Artificial Sequence
  Synthetic
aauaauuaaaacucaguaag

SEQ ID NO: 803406 - RNA, 20 nt, Artificial Sequence
  Synthetic
agugugggcaucucaguaag

SEQ ID NO: 803407 - RNA, 20 nt, Artificial Sequence
  Synthetic
aauaaagguacaagaguaag

SEQ ID NO: 803408 - RNA, 20 nt, Artificial Sequence
  Synthetic
agagauguuguaagaguaag

SEQ ID NO: 803409 - RNA, 20 nt, Artificial Sequence
  Synthetic
agugaggcagacagaguaag

SEQ ID NO: 803410 - RNA, 20 nt, Artificial Sequence
  Synthetic
aacagcugauacagaguaag

SEQ ID NO: 803411 - RNA, 20 nt, Artificial Sequence
  Synthetic
caacauguugaaauaguaag

SEQ ID NO: 803412 - RNA, 20 nt, Artificial Sequence
  Synthetic
augaucucacagauaguaag

SEQ ID NO: 803413 - RNA, 20 nt, Artificial Sequence
  Synthetic
auccagauaaauauaguaag

SEQ ID NO: 803414 - RNA, 20 nt, Artificial Sequence
  Synthetic
aaaauagggaauauaguaag

SEQ ID NO: 803415 - RNA, 20 nt, Artificial Sequence
  Synthetic
aauauccagacuauaguaag

SEQ ID NO: 803416 - RNA, 20 nt, Artificial Sequence
  Synthetic
uaaugucuucauaacguaag

SEQ ID NO: 803417 - RNA, 20 nt, Artificial Sequence
  Synthetic
ucuggccaaugaagcguaag

SEQ ID NO: 803418 - RNA, 20 nt, Artificial Sequence
  Synthetic
ugcauggacucacucguaag

SEQ ID NO: 803419 - RNA, 20 nt, Artificial Sequence
  Synthetic
cgcauguucucacucguaag

SEQ ID NO: 803420 - RNA, 20 nt, Artificial Sequence
  Synthetic
ugcauguucucacucguaag

SEQ ID NO: 803421 - RNA, 20 nt, Artificial Sequence
  Synthetic
cauauguucucacucguaag

SEQ ID NO: 803422 - RNA, 20 nt, Artificial Sequence
  Synthetic
uuauuuuaauaaaagguaag

SEQ ID NO: 803423 - RNA, 20 nt, Artificial Sequence
  Synthetic
cugacauucucccagguaag

SEQ ID NO: 803424 - RNA, 20 nt, Artificial Sequence
  Synthetic
uaagugcuauaggagguaag

SEQ ID NO: 803425 - RNA, 20 nt, Artificial Sequence
  Synthetic
ugaaugagaguggagguaag

SEQ ID NO: 803426 - RNA, 20 nt, Artificial Sequence
  Synthetic
caaaccauacacccgguaag

SEQ ID NO: 803427 - RNA, 20 nt, Artificial Sequence
  Synthetic
aaacaugaauuaaggguaag

SEQ ID NO: 803428 - RNA, 20 nt, Artificial Sequence
  Synthetic
cucuggaagcagaggguaag

SEQ ID NO: 803429 - RNA, 20 nt, Artificial Sequence
  Synthetic
ucaaacuugauuaggguaag

SEQ ID NO: 803430 - RNA, 20 nt, Artificial Sequence
  Synthetic
cucucacauaucuggguaag

SEQ ID NO: 803431 - RNA, 20 nt, Artificial Sequence
  Synthetic
uuuauuccauuguugguaag

SEQ ID NO: 803432 - RNA, 20 nt, Artificial Sequence
  Synthetic
agcacuuugggaaauguaag

SEQ ID NO: 803433 - RNA, 20 nt, Artificial Sequence
  Synthetic
uuuauuuguaugaauguaag

SEQ ID NO: 803434 - RNA, 20 nt, Artificial Sequence
  Synthetic
cuuuagauaccucauguaag

SEQ ID NO: 803435 - RNA, 20 nt, Artificial Sequence
  Synthetic
aaggccaggcuggauguaag

SEQ ID NO: 803436 - RNA, 20 nt, Artificial Sequence
  Synthetic
aaccuaucaucggcuguaag

SEQ ID NO: 803437 - RNA, 20 nt, Artificial Sequence
  Synthetic
caggagaaauaugguguaag

SEQ ID NO: 803438 - RNA, 20 nt, Artificial Sequence
  Synthetic
acuucucguguaguuguaag

SEQ ID NO: 803439 - RNA, 20 nt, Artificial Sequence
  Synthetic
uuaauuagaauguuuguaag

SEQ ID NO: 803440 - RNA, 20 nt, Artificial Sequence
  Synthetic
aaugauauauggaaauuaag

SEQ ID NO: 803441 - RNA, 20 nt, Artificial Sequence
  Synthetic
uauuucauuuuuaaauuaag

SEQ ID NO: 803442 - RNA, 20 nt, Artificial Sequence
  Synthetic
uccaucuuagaacaauuaag

SEQ ID NO: 803443 - RNA, 20 nt, Artificial Sequence
  Synthetic
acaaucaauuuugaauuaag

SEQ ID NO: 803444 - RNA, 20 nt, Artificial Sequence
  Synthetic
cuuccuguugaauaauuaag

SEQ ID NO: 803445 - RNA, 20 nt, Artificial Sequence
  Synthetic
uauauuuacuauuaauuaag

SEQ ID NO: 803446 - RNA, 20 nt, Artificial Sequence
  Synthetic
aaauuugucuuuuaauuaag

SEQ ID NO: 803447 - RNA, 20 nt, Artificial Sequence
  Synthetic
cugacaccauaaacauuaag

SEQ ID NO: 803448 - RNA, 20 nt, Artificial Sequence
  Synthetic
auacaauugugaacauuaag

SEQ ID NO: 803449 - RNA, 20 nt, Artificial Sequence
  Synthetic
cuaaggacucuaacauuaag

SEQ ID NO: 803450 - RNA, 20 nt, Artificial Sequence
  Synthetic
uguuuuucuaugacauuaag

SEQ ID NO: 803451 - RNA, 20 nt, Artificial Sequence
  Synthetic
accuggguauuuccauuaag

SEQ ID NO: 803452 - RNA, 20 nt, Artificial Sequence
  Synthetic
cauaaaacugaaagauuaag

SEQ ID NO: 803453 - RNA, 20 nt, Artificial Sequence
  Synthetic
caguaaaagacucgauuaag

SEQ ID NO: 803454 - RNA, 20 nt, Artificial Sequence
  Synthetic
agaguuucacaaauauuaag

SEQ ID NO: 803455 - RNA, 20 nt, Artificial Sequence
  Synthetic
agcuguuuacaucuauuaag

SEQ ID NO: 803456 - RNA, 20 nt, Artificial Sequence
  Synthetic
ucauuuccucuucuauuaag

SEQ ID NO: 803457 - RNA, 20 nt, Artificial Sequence
  Synthetic
aauggggcuuuuguauuaag

SEQ ID NO: 803458 - RNA, 20 nt, Artificial Sequence
  Synthetic
uguauuuuucaauuauuaag

SEQ ID NO: 803459 - RNA, 20 nt, Artificial Sequence
  Synthetic
ugcacuuaaaauuuauuaag

SEQ ID NO: 803460 - RNA, 20 nt, Artificial Sequence
  Synthetic
uucacaauuaguuuauuaag

SEQ ID NO: 803461 - RNA, 20 nt, Artificial Sequence
  Synthetic
cacuauuuuauagccuuaag

SEQ ID NO: 803462 - RNA, 20 nt, Artificial Sequence
  Synthetic
ccucuuugauaauccuuaag

SEQ ID NO: 803463 - RNA, 20 nt, Artificial Sequence
  Synthetic
cuagguuucaguuccuuaag

SEQ ID NO: 803464 - RNA, 20 nt, Artificial Sequence
  Synthetic
agccaagaagcaugcuuaag

SEQ ID NO: 803465 - RNA, 20 nt, Artificial Sequence
  Synthetic
ucaaacaauuucugcuuaag

SEQ ID NO: 803466 - RNA, 20 nt, Artificial Sequence
  Synthetic
uauuuuuucaguugcuuaag

SEQ ID NO: 803467 - RNA, 20 nt, Artificial Sequence
  Synthetic
ucagaauucugcaucuuaag

SEQ ID NO: 803468 - RNA, 20 nt, Artificial Sequence
  Synthetic
uacuugaauugcaucuuaag

SEQ ID NO: 803469 - RNA, 20 nt, Artificial Sequence
  Synthetic
aauugcauuaucaucuuaag

SEQ ID NO: 803470 - RNA, 20 nt, Artificial Sequence
  Synthetic
ccauguaccuaacucuuaag

SEQ ID NO: 803471 - RNA, 20 nt, Artificial Sequence
  Synthetic
cuaauuuggugagucuuaag

SEQ ID NO: 803472 - RNA, 20 nt, Artificial Sequence
  Synthetic
aauauuuauggugucuuaag

SEQ ID NO: 803473 - RNA, 20 nt, Artificial Sequence
  Synthetic
aaguacaaucaauucuuaag

SEQ ID NO: 803474 - RNA, 20 nt, Artificial Sequence
  Synthetic
uuuuuccauuuguucuuaag

SEQ ID NO: 803475 - RNA, 20 nt, Artificial Sequence
  Synthetic
aagguuguauacaaguuaag

SEQ ID NO: 803476 - RNA, 20 nt, Artificial Sequence
  Synthetic
aaaacauacaucuaguuaag

SEQ ID NO: 803477 - RNA, 20 nt, Artificial Sequence
  Synthetic
augaguuugguaagguuaag

SEQ ID NO: 803478 - RNA, 20 nt, Artificial Sequence
  Synthetic
aaaaaccagaaucuguuaag

SEQ ID NO: 803479 - RNA, 20 nt, Artificial Sequence
  Synthetic
augacccuagaaaauuuaag

SEQ ID NO: 803480 - RNA, 20 nt, Artificial Sequence
  Synthetic
uagugguucucaaauuuaag

SEQ ID NO: 803481 - RNA, 20 nt, Artificial Sequence
  Synthetic
aaacaauugaaacauuuaag

SEQ ID NO: 803482 - RNA, 20 nt, Artificial Sequence
  Synthetic
uugccucugauacauuuaag

SEQ ID NO: 803483 - RNA, 20 nt, Artificial Sequence
  Synthetic
uauguauaauaucauuuaag

SEQ ID NO: 803484 - RNA, 20 nt, Artificial Sequence
  Synthetic
acuauuguuuuagauuuaag

SEQ ID NO: 803485 - RNA, 20 nt, Artificial Sequence
  Synthetic
cuaccucuauuggauuuaag

SEQ ID NO: 803486 - RNA, 20 nt, Artificial Sequence
  Synthetic
cuaugaccuuuuuauuuaag

SEQ ID NO: 803487 - RNA, 20 nt, Artificial Sequence
  Synthetic
agaaaauuaugcacuuuaag

SEQ ID NO: 803488 - RNA, 20 nt, Artificial Sequence
  Synthetic
uauuuuagaguuacuuuaag

SEQ ID NO: 803489 - RNA, 20 nt, Artificial Sequence
  Synthetic
cgggagauugugccuuuaag

SEQ ID NO: 803490 - RNA, 20 nt, Artificial Sequence
  Synthetic
aaaacauuaacugcuuuaag

SEQ ID NO: 803491 - RNA, 20 nt, Artificial Sequence
  Synthetic
uaagagguaggguguuuaag

SEQ ID NO: 803492 - RNA, 20 nt, Artificial Sequence
  Synthetic
uuuuuuuuguaaauuuuaag

SEQ ID NO: 803493 - RNA, 20 nt, Artificial Sequence
  Synthetic
uaaaccuuaugaauuuuaag

SEQ ID NO: 803494 - RNA, 20 nt, Artificial Sequence
  Synthetic
uguaaucccaccauuuuaag

SEQ ID NO: 803495 - RNA, 20 nt, Artificial Sequence
  Synthetic
acagcuggcuuuauuuuaag

SEQ ID NO: 803496 - RNA, 20 nt, Artificial Sequence
  Synthetic
cuuucuagaggacuuuuaag

SEQ ID NO: 803497 - RNA, 20 nt, Artificial Sequence
  Synthetic
uuucaguuaagucuuuuaag

SEQ ID NO: 803498 - RNA, 20 nt, Artificial Sequence
  Synthetic
acagaauuccaaguuuuaag

SEQ ID NO: 803499 - RNA, 20 nt, Artificial Sequence
  Synthetic
uaacuagugauuguuuuaag

SEQ ID NO: 803500 - RNA, 20 nt, Artificial Sequence
  Synthetic
ucauuauguuucuuuuuaag

SEQ ID NO: 803501 - RNA, 20 nt, Artificial Sequence
  Synthetic
aaaccucacaauuuuuuaag

SEQ ID NO: 803502 - RNA, 20 nt, Artificial Sequence
  Synthetic
aaaaauaaaaaaaaaaacag

SEQ ID NO: 803503 - RNA, 20 nt, Artificial Sequence
  Synthetic
uguuuggcaaauaaaaacag

SEQ ID NO: 803504 - RNA, 20 nt, Artificial Sequence
  Synthetic
uuaagauauuauaaaaacag

SEQ ID NO: 803505 - RNA, 20 nt, Artificial Sequence
  Synthetic
aaagagaaaguuaaaaacag

SEQ ID NO: 803506 - RNA, 20 nt, Artificial Sequence
  Synthetic
ugucaauuauuuaaaaacag

SEQ ID NO: 803507 - RNA, 20 nt, Artificial Sequence
  Synthetic
agucaugugcaacaaaacag

SEQ ID NO: 803508 - RNA, 20 nt, Artificial Sequence
  Synthetic
uuuugagagccacaaaacag

SEQ ID NO: 803509 - RNA, 20 nt, Artificial Sequence
  Synthetic
cuuuuguaucuucaaaacag

SEQ ID NO: 803510 - RNA, 20 nt, Artificial Sequence
  Synthetic
uucggguucucagaaaacag

SEQ ID NO: 803511 - RNA, 20 nt, Artificial Sequence
  Synthetic
uuuuccauuggagaaaacag

SEQ ID NO: 803512 - RNA, 20 nt, Artificial Sequence
  Synthetic
ccuugagagaaggaaaacag

SEQ ID NO: 803513 - RNA, 20 nt, Artificial Sequence
  Synthetic
caggagguaaaugaaaacag

SEQ ID NO: 803514 - RNA, 20 nt, Artificial Sequence
  Synthetic
ucacuuaucccauaaaacag

SEQ ID NO: 803515 - RNA, 20 nt, Artificial Sequence
  Synthetic
auuauaugaaucuaaaacag

SEQ ID NO: 803516 - RNA, 20 nt, Artificial Sequence
  Synthetic
cuaguauuuaucuaaaacag

SEQ ID NO: 803517 - RNA, 20 nt, Artificial Sequence
  Synthetic
ucuuccagucaguaaaacag

SEQ ID NO: 803518 - RNA, 20 nt, Artificial Sequence
  Synthetic
uuuuaacgcauguaaaacag

SEQ ID NO: 803519 - RNA, 20 nt, Artificial Sequence
  Synthetic
aaacaaacgauuuaaaacag

SEQ ID NO: 803520 - RNA, 20 nt, Artificial Sequence
  Synthetic
aaguaaauggaagcaaacag

SEQ ID NO: 803521 - RNA, 20 nt, Artificial Sequence
  Synthetic
aaaguuuaaugggcaaacag

SEQ ID NO: 803522 - RNA, 20 nt, Artificial Sequence
  Synthetic
cugcaagauaggucaaacag

SEQ ID NO: 803523 - RNA, 20 nt, Artificial Sequence
  Synthetic
acauucgauauuucaaacag

SEQ ID NO: 803524 - RNA, 20 nt, Artificial Sequence
  Synthetic
uuagaaacaaauagaaacag

SEQ ID NO: 803525 - RNA, 20 nt, Artificial Sequence
  Synthetic
acgugcuuuucaggaaacag

SEQ ID NO: 803526 - RNA, 20 nt, Artificial Sequence
  Synthetic
acuacaaugaagggaaacag

SEQ ID NO: 803527 - RNA, 20 nt, Artificial Sequence
  Synthetic
agucaucuacauggaaacag

SEQ ID NO: 803528 - RNA, 20 nt, Artificial Sequence
  Synthetic
auggugauagugugaaacag

SEQ ID NO: 803529 - RNA, 20 nt, Artificial Sequence
  Synthetic
aggugacuuucucuaaacag

SEQ ID NO: 803530 - RNA, 20 nt, Artificial Sequence
  Synthetic
acagauagugaauuaaacag

SEQ ID NO: 803531 - RNA, 20 nt, Artificial Sequence
  Synthetic
agagacuuacgguuaaacag

SEQ ID NO: 803532 - RNA, 20 nt, Artificial Sequence
  Synthetic
acugaaccacaaaacaacag

SEQ ID NO: 803533 - RNA, 20 nt, Artificial Sequence
  Synthetic
ucuuaauaaggaaacaacag

SEQ ID NO: 803534 - RNA, 20 nt, Artificial Sequence
  Synthetic
acuauuugauagcacaacag

SEQ ID NO: 803535 - RNA, 20 nt, Artificial Sequence
  Synthetic
ugacagagcacagacaacag

SEQ ID NO: 803536 - RNA, 20 nt, Artificial Sequence
  Synthetic
caaggaguccgggacaacag

SEQ ID NO: 803537 - RNA, 20 nt, Artificial Sequence
  Synthetic
caauggcaaauguacaacag

SEQ ID NO: 803538 - RNA, 20 nt, Artificial Sequence
  Synthetic
cuuuguggaacucgcaacag

SEQ ID NO: 803539 - RNA, 20 nt, Artificial Sequence
  Synthetic
uucuucaauaaaugcaacag

SEQ ID NO: 803540 - RNA, 20 nt, Artificial Sequence
  Synthetic
aguauuugauagugcaacag

SEQ ID NO: 803541 - RNA, 20 nt, Artificial Sequence
  Synthetic
accugaagcagaaucaacag

SEQ ID NO: 803542 - RNA, 20 nt, Artificial Sequence
  Synthetic
ugagaaguaggucucaacag

SEQ ID NO: 803543 - RNA, 20 nt, Artificial Sequence
  Synthetic
uaauaacgauuaaagaacag

SEQ ID NO: 803544 - RNA, 20 nt, Artificial Sequence
  Synthetic
agaccaacggaacagaacag

SEQ ID NO: 803545 - RNA, 20 nt, Artificial Sequence
  Synthetic
agaccaauggaacagaacag

SEQ ID NO: 803546 - RNA, 20 nt, Artificial Sequence
  Synthetic
augcauugaggagagaacag

SEQ ID NO: 803547 - RNA, 20 nt, Artificial Sequence
  Synthetic
aacgcagacccugagaacag

SEQ ID NO: 803548 - RNA, 20 nt, Artificial Sequence
  Synthetic
cacacaaugugauagaacag

SEQ ID NO: 803549 - RNA, 20 nt, Artificial Sequence
  Synthetic
aaacagcagcaguagaacag

SEQ ID NO: 803550 - RNA, 20 nt, Artificial Sequence
  Synthetic
uauauagaccaauggaacag

SEQ ID NO: 803551 - RNA, 20 nt, Artificial Sequence
  Synthetic
auaaugaggaccuggaacag

SEQ ID NO: 803552 - RNA, 20 nt, Artificial Sequence
  Synthetic
caaugcaggauuuggaacag

SEQ ID NO: 803553 - RNA, 20 nt, Artificial Sequence
  Synthetic
agugucccaggaaugaacag

SEQ ID NO: 803554 - RNA, 20 nt, Artificial Sequence
  Synthetic
uuucguauuuucuugaacag

SEQ ID NO: 803555 - RNA, 20 nt, Artificial Sequence
  Synthetic
agacauuagcuguugaacag

SEQ ID NO: 803556 - RNA, 20 nt, Artificial Sequence
  Synthetic
cacaaauggaaaaauaacag

SEQ ID NO: 803557 - RNA, 20 nt, Artificial Sequence
  Synthetic
agaagaauagcgaauaacag

SEQ ID NO: 803558 - RNA, 20 nt, Artificial Sequence
  Synthetic
cauucucagcaaacuaacag

SEQ ID NO: 803559 - RNA, 20 nt, Artificial Sequence
  Synthetic
aaagcccaucagacuaacag

SEQ ID NO: 803560 - RNA, 20 nt, Artificial Sequence
  Synthetic
accaaaccuguaccuaacag

SEQ ID NO: 803561 - RNA, 20 nt, Artificial Sequence
  Synthetic
uauaguagccauccuaacag

SEQ ID NO: 803562 - RNA, 20 nt, Artificial Sequence
  Synthetic
uugcauagaguacguaacag

SEQ ID NO: 803563 - RNA, 20 nt, Artificial Sequence
  Synthetic
uguuuagucuauuguaacag

SEQ ID NO: 803564 - RNA, 20 nt, Artificial Sequence
  Synthetic
accuggccaggcauuaacag

SEQ ID NO: 803565 - RNA, 20 nt, Artificial Sequence
  Synthetic
aauaaaaagggaguuaacag

SEQ ID NO: 803566 - RNA, 20 nt, Artificial Sequence
  Synthetic
aguagaaucaugguuaacag

SEQ ID NO: 803567 - RNA, 20 nt, Artificial Sequence
  Synthetic
auaauuagaccuguuaacag

SEQ ID NO: 803568 - RNA, 20 nt, Artificial Sequence
  Synthetic
uggaggcaauccuuuaacag

SEQ ID NO: 803569 - RNA, 20 nt, Artificial Sequence
  Synthetic
aacauauucaaguuuaacag

SEQ ID NO: 803570 - RNA, 20 nt, Artificial Sequence
  Synthetic
uuccauucaugguuuaacag

SEQ ID NO: 803571 - RNA, 20 nt, Artificial Sequence
  Synthetic
cagauauucagcaaacacag

SEQ ID NO: 803572 - RNA, 20 nt, Artificial Sequence
  Synthetic
ccuaaaagugagaaacacag

SEQ ID NO: 803573 - RNA, 20 nt, Artificial Sequence
  Synthetic
uaaaaagugcaagaacacag

SEQ ID NO: 803574 - RNA, 20 nt, Artificial Sequence
  Synthetic
aaugccacaaaaacacacag

SEQ ID NO: 803575 - RNA, 20 nt, Artificial Sequence
  Synthetic
aaaacaacaggaacacacag

SEQ ID NO: 803576 - RNA, 20 nt, Artificial Sequence
  Synthetic
cauuucaaaaauacacacag

SEQ ID NO: 803577 - RNA, 20 nt, Artificial Sequence
  Synthetic
aaccauuucuauacacacag

SEQ ID NO: 803578 - RNA, 20 nt, Artificial Sequence
  Synthetic
cugauauuugcuacacacag

SEQ ID NO: 803579 - RNA, 20 nt, Artificial Sequence
  Synthetic
acuuguauaucuccacacag

SEQ ID NO: 803580 - RNA, 20 nt, Artificial Sequence
  Synthetic
aguccugaugccgcacacag

SEQ ID NO: 803581 - RNA, 20 nt, Artificial Sequence
  Synthetic
ugaucauucauggcacacag

SEQ ID NO: 803582 - RNA, 20 nt, Artificial Sequence
  Synthetic
auguuguugaaaagacacag

SEQ ID NO: 803583 - RNA, 20 nt, Artificial Sequence
  Synthetic
uuuuacaaaugaggacacag

SEQ ID NO: 803584 - RNA, 20 nt, Artificial Sequence
  Synthetic
uaagaguuggccggacacag

SEQ ID NO: 803585 - RNA, 20 nt, Artificial Sequence
  Synthetic
ucuauagcugaaugacacag

SEQ ID NO: 803586 - RNA, 20 nt, Artificial Sequence
  Synthetic
uacacugugauuugacacag

SEQ ID NO: 803587 - RNA, 20 nt, Artificial Sequence
  Synthetic
caagggaugcacauacacag

SEQ ID NO: 803588 - RNA, 20 nt, Artificial Sequence
  Synthetic
aaaguguugucucuacacag

SEQ ID NO: 803589 - RNA, 20 nt, Artificial Sequence
  Synthetic
cagaggauaugucuacacag

SEQ ID NO: 803590 - RNA, 20 nt, Artificial Sequence
  Synthetic
cauugaaagguuuuacacag

SEQ ID NO: 803591 - RNA, 20 nt, Artificial Sequence
  Synthetic
caucauauuguuuuacacag

SEQ ID NO: 803592 - RNA, 20 nt, Artificial Sequence
  Synthetic
aguaucuucucagaccacag

SEQ ID NO: 803593 - RNA, 20 nt, Artificial Sequence
  Synthetic
caugauucugccuaccacag

SEQ ID NO: 803594 - RNA, 20 nt, Artificial Sequence
  Synthetic
ucuacccugcaaacccacag

SEQ ID NO: 803595 - RNA, 20 nt, Artificial Sequence
  Synthetic
accacuccuuguccccacag

SEQ ID NO: 803596 - RNA, 20 nt, Artificial Sequence
  Synthetic
acagugggugcagcccacag

SEQ ID NO: 803597 - RNA, 20 nt, Artificial Sequence
  Synthetic
ugggcacugagagcccacag

SEQ ID NO: 803598 - RNA, 20 nt, Artificial Sequence
  Synthetic
accucuacuuaaucccacag

SEQ ID NO: 803599 - RNA, 20 nt, Artificial Sequence
  Synthetic
uuuguauauacaucccacag

SEQ ID NO: 803600 - RNA, 20 nt, Artificial Sequence
  Synthetic
cauaauguacaucuccacag

SEQ ID NO: 803601 - RNA, 20 nt, Artificial Sequence
  Synthetic
cuauaaaccccucuccacag

SEQ ID NO: 803602 - RNA, 20 nt, Artificial Sequence
  Synthetic
uccuaccuacaauuccacag

SEQ ID NO: 803603 - RNA, 20 nt, Artificial Sequence
  Synthetic
ccccaaacugcuuuccacag

SEQ ID NO: 803604 - RNA, 20 nt, Artificial Sequence
  Synthetic
uuccaaacugcuuuccacag

SEQ ID NO: 803605 - RNA, 20 nt, Artificial Sequence
  Synthetic
cccaugggugguuuccacag

SEQ ID NO: 803606 - RNA, 20 nt, Artificial Sequence
  Synthetic
caacucuaaauacagcacag

SEQ ID NO: 803607 - RNA, 20 nt, Artificial Sequence
  Synthetic
ccaaaaggauuagagcacag

SEQ ID NO: 803608 - RNA, 20 nt, Artificial Sequence
  Synthetic
auuucccuauaggagcacag

SEQ ID NO: 803609 - RNA, 20 nt, Artificial Sequence
  Synthetic
ucacccaggcuggagcacag

SEQ ID NO: 803610 - RNA, 20 nt, Artificial Sequence
  Synthetic
ccugcacauuaaaggcacag

SEQ ID NO: 803611 - RNA, 20 nt, Artificial Sequence
  Synthetic
acacaucuucucaggcacag

SEQ ID NO: 803612 - RNA, 20 nt, Artificial Sequence
  Synthetic
uccuuugcagccgggcacag

SEQ ID NO: 803613 - RNA, 20 nt, Artificial Sequence
  Synthetic
auuaagacagcugggcacag

SEQ ID NO: 803614 - RNA, 20 nt, Artificial Sequence
  Synthetic
caagucuuggcugggcacag

SEQ ID NO: 803615 - RNA, 20 nt, Artificial Sequence
  Synthetic
aaugacuccuuuuugcacag

SEQ ID NO: 803616 - RNA, 20 nt, Artificial Sequence
  Synthetic
caacagaacuuaaaucacag

SEQ ID NO: 803617 - RNA, 20 nt, Artificial Sequence
  Synthetic
cagaaagggccacaucacag

SEQ ID NO: 803618 - RNA, 20 nt, Artificial Sequence
  Synthetic
ucugaaaaugaggaucacag

SEQ ID NO: 803619 - RNA, 20 nt, Artificial Sequence
  Synthetic
uagauuuuuggugaucacag

SEQ ID NO: 803620 - RNA, 20 nt, Artificial Sequence
  Synthetic
uaaaacagcuguccucacag

SEQ ID NO: 803621 - RNA, 20 nt, Artificial Sequence
  Synthetic
ugauaguguucaucucacag

SEQ ID NO: 803622 - RNA, 20 nt, Artificial Sequence
  Synthetic
uuaagcccuaguucucacag

SEQ ID NO: 803623 - RNA, 20 nt, Artificial Sequence
  Synthetic
caugagaaccagagucacag

SEQ ID NO: 803624 - RNA, 20 nt, Artificial Sequence
  Synthetic
uaggcaaaccggugucacag

SEQ ID NO: 803625 - RNA, 20 nt, Artificial Sequence
  Synthetic
cauguacaggcuugucacag

SEQ ID NO: 803626 - RNA, 20 nt, Artificial Sequence
  Synthetic
aaaaauuuuucacuucacag

SEQ ID NO: 803627 - RNA, 20 nt, Artificial Sequence
  Synthetic
uguugauuccuacuucacag

SEQ ID NO: 803628 - RNA, 20 nt, Artificial Sequence
  Synthetic
uauuuaauggugguucacag

SEQ ID NO: 803629 - RNA, 20 nt, Artificial Sequence
  Synthetic
aaucauuuaacuguucacag

SEQ ID NO: 803630 - RNA, 20 nt, Artificial Sequence
  Synthetic
uguuacauuccauuucacag

SEQ ID NO: 803631 - RNA, 20 nt, Artificial Sequence
  Synthetic
uucuggacaugauuucacag

SEQ ID NO: 803632 - RNA, 20 nt, Artificial Sequence
  Synthetic
agagaaggaugauuucacag

SEQ ID NO: 803633 - RNA, 20 nt, Artificial Sequence
  Synthetic
agugcuagauaguuucacag

SEQ ID NO: 803634 - RNA, 20 nt, Artificial Sequence
  Synthetic
aguucaugaguguuucacag

SEQ ID NO: 803635 - RNA, 20 nt, Artificial Sequence
  Synthetic
aggucauacugccaagacag

SEQ ID NO: 803636 - RNA, 20 nt, Artificial Sequence
  Synthetic
uccuauaaaaggcaagacag

SEQ ID NO: 803637 - RNA, 20 nt, Artificial Sequence
  Synthetic
accuguacuagagaagacag

SEQ ID NO: 803638 - RNA, 20 nt, Artificial Sequence
  Synthetic
uagggguacagggaagacag

SEQ ID NO: 803639 - RNA, 20 nt, Artificial Sequence
  Synthetic
ucccagcuacuggaagacag

SEQ ID NO: 803640 - RNA, 20 nt, Artificial Sequence
  Synthetic
cugagaagaauugaagacag

SEQ ID NO: 803641 - RNA, 20 nt, Artificial Sequence
  Synthetic
ugagucaccauaacagacag

SEQ ID NO: 803642 - RNA, 20 nt, Artificial Sequence
  Synthetic
aggugaggauauacagacag

SEQ ID NO: 803643 - RNA, 20 nt, Artificial Sequence
  Synthetic
uuccucuaccaggcagacag

SEQ ID NO: 803644 - RNA, 20 nt, Artificial Sequence
  Synthetic
uacaagucagaaucagacag

SEQ ID NO: 803645 - RNA, 20 nt, Artificial Sequence
  Synthetic
uacucaaggcauucagacag

SEQ ID NO: 803646 - RNA, 20 nt, Artificial Sequence
  Synthetic
uguauuuuuaguagagacag

SEQ ID NO: 803647 - RNA, 20 nt, Artificial Sequence
  Synthetic
aaugaauuuauuagagacag

SEQ ID NO: 803648 - RNA, 20 nt, Artificial Sequence
  Synthetic
ccacagagaacaggagacag

SEQ ID NO: 803649 - RNA, 20 nt, Artificial Sequence
  Synthetic
cgcuugaacccaggagacag

SEQ ID NO: 803650 - RNA, 20 nt, Artificial Sequence
  Synthetic
auucuuucuccaggagacag

SEQ ID NO: 803651 - RNA, 20 nt, Artificial Sequence
  Synthetic
ugcuuguaccuaggagacag

SEQ ID NO: 803652 - RNA, 20 nt, Artificial Sequence
  Synthetic
ugcuugaaacugggagacag

SEQ ID NO: 803653 - RNA, 20 nt, Artificial Sequence
  Synthetic
cacuugaaccugggagacag

SEQ ID NO: 803654 - RNA, 20 nt, Artificial Sequence
  Synthetic
ugcuugaaccugggagacag

SEQ ID NO: 803655 - RNA, 20 nt, Artificial Sequence
  Synthetic
aaaccaaaagagugagacag

SEQ ID NO: 803656 - RNA, 20 nt, Artificial Sequence
  Synthetic
auuuaaaagagaauagacag

SEQ ID NO: 803657 - RNA, 20 nt, Artificial Sequence
  Synthetic
aacuuuggucuuauagacag

SEQ ID NO: 803658 - RNA, 20 nt, Artificial Sequence
  Synthetic
acaaaguuucaacuagacag

SEQ ID NO: 803659 - RNA, 20 nt, Artificial Sequence
  Synthetic
uguaauaggaaaguagacag

SEQ ID NO: 803660 - RNA, 20 nt, Artificial Sequence
  Synthetic
agaagacaggauguagacag

SEQ ID NO: 803661 - RNA, 20 nt, Artificial Sequence
  Synthetic
cacugggacugguuagacag

SEQ ID NO: 803662 - RNA, 20 nt, Artificial Sequence
  Synthetic
cacuccagccugggcgacag

SEQ ID NO: 803663 - RNA, 20 nt, Artificial Sequence
  Synthetic
uugucuuuuacuugcgacag

SEQ ID NO: 803664 - RNA, 20 nt, Artificial Sequence
  Synthetic
agggagaacaggaaggacag

SEQ ID NO: 803665 - RNA, 20 nt, Artificial Sequence
  Synthetic
auggcauaagcagaggacag

SEQ ID NO: 803666 - RNA, 20 nt, Artificial Sequence
  Synthetic
agcacaagcacauaggacag

SEQ ID NO: 803667 - RNA, 20 nt, Artificial Sequence
  Synthetic
cugggcaugauauaggacag

SEQ ID NO: 803668 - RNA, 20 nt, Artificial Sequence
  Synthetic
cuggcuguucaguaggacag

SEQ ID NO: 803669 - RNA, 20 nt, Artificial Sequence
  Synthetic
ucuguauacauguaggacag

SEQ ID NO: 803670 - RNA, 20 nt, Artificial Sequence
  Synthetic
uccacagaucucucggacag

SEQ ID NO: 803671 - RNA, 20 nt, Artificial Sequence
  Synthetic
uuguuagaagccagggacag

SEQ ID NO: 803672 - RNA, 20 nt, Artificial Sequence
  Synthetic
ugaccacagagacgggacag

SEQ ID NO: 803673 - RNA, 20 nt, Artificial Sequence
  Synthetic
uugagaguauaaggggacag

SEQ ID NO: 803674 - RNA, 20 nt, Artificial Sequence
  Synthetic
ugaacccaggagggggacag

SEQ ID NO: 803675 - RNA, 20 nt, Artificial Sequence
  Synthetic
uugcuuucuccuggggacag

SEQ ID NO: 803676 - RNA, 20 nt, Artificial Sequence
  Synthetic
uuuuuuaaaguuugggacag

SEQ ID NO: 803677 - RNA, 20 nt, Artificial Sequence
  Synthetic
uuguggggucugguggacag

SEQ ID NO: 803678 - RNA, 20 nt, Artificial Sequence
  Synthetic
uaaccaaacuguguggacag

SEQ ID NO: 803679 - RNA, 20 nt, Artificial Sequence
  Synthetic
agacuuauugguuuggacag

SEQ ID NO: 803680 - RNA, 20 nt, Artificial Sequence
  Synthetic
aguaauuccccagaugacag

SEQ ID NO: 803681 - RNA, 20 nt, Artificial Sequence
  Synthetic
cacuucagccuggaugacag

SEQ ID NO: 803682 - RNA, 20 nt, Artificial Sequence
  Synthetic
ugggagcccaaugaugacag

SEQ ID NO: 803683 - RNA, 20 nt, Artificial Sequence
  Synthetic
ucucuuucaaaaacugacag

SEQ ID NO: 803684 - RNA, 20 nt, Artificial Sequence
  Synthetic
uguguuccaagaacugacag

SEQ ID NO: 803685 - RNA, 20 nt, Artificial Sequence
  Synthetic
uccucaaagaccacugacag

SEQ ID NO: 803686 - RNA, 20 nt, Artificial Sequence
  Synthetic
ugagcuuucagcucugacag

SEQ ID NO: 803687 - RNA, 20 nt, Artificial Sequence
  Synthetic
acauggaagaucucugacag

SEQ ID NO: 803688 - RNA, 20 nt, Artificial Sequence
  Synthetic
ccaugucuacuuucugacag

SEQ ID NO: 803689 - RNA, 20 nt, Artificial Sequence
  Synthetic
cucugcccccuuagugacag

SEQ ID NO: 803690 - RNA, 20 nt, Artificial Sequence
  Synthetic
uauaauugaaucugugacag

SEQ ID NO: 803691 - RNA, 20 nt, Artificial Sequence
  Synthetic
auuaguaacuguugugacag

SEQ ID NO: 803692 - RNA, 20 nt, Artificial Sequence
  Synthetic
ugucacuacuuuugugacag

SEQ ID NO: 803693 - RNA, 20 nt, Artificial Sequence
  Synthetic
cguuaaucuaauauugacag

SEQ ID NO: 803694 - RNA, 20 nt, Artificial Sequence
  Synthetic
aacuaaaugucuauugacag

SEQ ID NO: 803695 - RNA, 20 nt, Artificial Sequence
  Synthetic
ucauccauugaacuugacag

SEQ ID NO: 803696 - RNA, 20 nt, Artificial Sequence
  Synthetic
aguacagauuaacuugacag

SEQ ID NO: 803697 - RNA, 20 nt, Artificial Sequence
  Synthetic
aagcagaacagaguugacag

SEQ ID NO: 803698 - RNA, 20 nt, Artificial Sequence
  Synthetic
aaauaaaauaaaaaauacag

SEQ ID NO: 803699 - RNA, 20 nt, Artificial Sequence
  Synthetic
aagaugccaugaaaauacag

SEQ ID NO: 803700 - RNA, 20 nt, Artificial Sequence
  Synthetic
auaucagguaugaaauacag

SEQ ID NO: 803701 - RNA, 20 nt, Artificial Sequence
  Synthetic
acagaggaaauucaauacag

SEQ ID NO: 803702 - RNA, 20 nt, Artificial Sequence
  Synthetic
ugaacacucagagaauacag

SEQ ID NO: 803703 - RNA, 20 nt, Artificial Sequence
  Synthetic
auaugcaguauggaauacag

SEQ ID NO: 803704 - RNA, 20 nt, Artificial Sequence
  Synthetic
uaaagucauuuauaauacag

SEQ ID NO: 803705 - RNA, 20 nt, Artificial Sequence
  Synthetic
ugugaagaaaaguaauacag

SEQ ID NO: 803706 - RNA, 20 nt, Artificial Sequence
  Synthetic
auaugcauauuguaauacag

SEQ ID NO: 803707 - RNA, 20 nt, Artificial Sequence
  Synthetic
auaugcguauuguaauacag

SEQ ID NO: 803708 - RNA, 20 nt, Artificial Sequence
  Synthetic
aaggugccaagaacauacag

SEQ ID NO: 803709 - RNA, 20 nt, Artificial Sequence
  Synthetic
cccuuuuguuacccauacag

SEQ ID NO: 803710 - RNA, 20 nt, Artificial Sequence
  Synthetic
cuuugagguuguccauacag

SEQ ID NO: 803711 - RNA, 20 nt, Artificial Sequence
  Synthetic
uaacgccugcucucauacag

SEQ ID NO: 803712 - RNA, 20 nt, Artificial Sequence
  Synthetic
uauuacuuauuaagauacag

SEQ ID NO: 803713 - RNA, 20 nt, Artificial Sequence
  Synthetic
ucuaggaguucuagauacag

SEQ ID NO: 803714 - RNA, 20 nt, Artificial Sequence
  Synthetic
uucacacaaauaggauacag

SEQ ID NO: 803715 - RNA, 20 nt, Artificial Sequence
  Synthetic
cuaaacuaacagggauacag

SEQ ID NO: 803716 - RNA, 20 nt, Artificial Sequence
  Synthetic
uguggaacccauggauacag

SEQ ID NO: 803717 - RNA, 20 nt, Artificial Sequence
  Synthetic
agaaauaaagaaauauacag

SEQ ID NO: 803718 - RNA, 20 nt, Artificial Sequence
  Synthetic
uaggauauguguauauacag

SEQ ID NO: 803719 - RNA, 20 nt, Artificial Sequence
  Synthetic
aaauuuuauuuuauauacag

SEQ ID NO: 803720 - RNA, 20 nt, Artificial Sequence
  Synthetic
uaacaggaaaggcacuacag

SEQ ID NO: 803721 - RNA, 20 nt, Artificial Sequence
  Synthetic
ugacagcauucucacuacag

SEQ ID NO: 803722 - RNA, 20 nt, Artificial Sequence
  Synthetic
auagacacuggggacuacag

SEQ ID NO: 803723 - RNA, 20 nt, Artificial Sequence
  Synthetic
aaaguagacucuuccuacag

SEQ ID NO: 803724 - RNA, 20 nt, Artificial Sequence
  Synthetic
cuuuacacaagaagcuacag

SEQ ID NO: 803725 - RNA, 20 nt, Artificial Sequence
  Synthetic
cagggaagauggggcuacag

SEQ ID NO: 803726 - RNA, 20 nt, Artificial Sequence
  Synthetic
cugaguagcuggggcuacag

SEQ ID NO: 803727 - RNA, 20 nt, Artificial Sequence
  Synthetic
agcucagcccauggcuacag

SEQ ID NO: 803728 - RNA, 20 nt, Artificial Sequence
  Synthetic
ugauaaacaguuugcuacag

SEQ ID NO: 803729 - RNA, 20 nt, Artificial Sequence
  Synthetic
ucauuguccccaaucuacag

SEQ ID NO: 803730 - RNA, 20 nt, Artificial Sequence
  Synthetic
aaucggaggcagaucuacag

SEQ ID NO: 803731 - RNA, 20 nt, Artificial Sequence
  Synthetic
uaucaacugcugcucuacag

SEQ ID NO: 803732 - RNA, 20 nt, Artificial Sequence
  Synthetic
aaacgcccugcucucuacag

SEQ ID NO: 803733 - RNA, 20 nt, Artificial Sequence
  Synthetic
auugacaguagagucuacag

SEQ ID NO: 803734 - RNA, 20 nt, Artificial Sequence
  Synthetic
ugagucuucaaauucuacag

SEQ ID NO: 803735 - RNA, 20 nt, Artificial Sequence
  Synthetic
augaacucugacaaguacag

SEQ ID NO: 803736 - RNA, 20 nt, Artificial Sequence
  Synthetic
aucaagaauauccaguacag

SEQ ID NO: 803737 - RNA, 20 nt, Artificial Sequence
  Synthetic
ccuauaaaucaucaguacag

SEQ ID NO: 803738 - RNA, 20 nt, Artificial Sequence
  Synthetic
ucuaggcacugggaguacag

SEQ ID NO: 803739 - RNA, 20 nt, Artificial Sequence
  Synthetic
ucacucagccuggaguacag

SEQ ID NO: 803740 - RNA, 20 nt, Artificial Sequence
  Synthetic
caccccaggcuggaguacag

SEQ ID NO: 803741 - RNA, 20 nt, Artificial Sequence
  Synthetic
ugagagguaaaauaguacag

SEQ ID NO: 803742 - RNA, 20 nt, Artificial Sequence
  Synthetic
uuacucaggcuguaguacag

SEQ ID NO: 803743 - RNA, 20 nt, Artificial Sequence
  Synthetic
aauggggggaaaggguacag

SEQ ID NO: 803744 - RNA, 20 nt, Artificial Sequence
  Synthetic
agcagguaauggaauuacag

SEQ ID NO: 803745 - RNA, 20 nt, Artificial Sequence
  Synthetic
uggagguaauugaauuacag

SEQ ID NO: 803746 - RNA, 20 nt, Artificial Sequence
  Synthetic
ugacuuccccaggauuacag

SEQ ID NO: 803747 - RNA, 20 nt, Artificial Sequence
  Synthetic
cugagaagaugggauuacag

SEQ ID NO: 803748 - RNA, 20 nt, Artificial Sequence
  Synthetic
cugaguagcugggauuacag

SEQ ID NO: 803749 - RNA, 20 nt, Artificial Sequence
  Synthetic
caucuccuagaauauuacag

SEQ ID NO: 803750 - RNA, 20 nt, Artificial Sequence
  Synthetic
cuaagccaaauauauuacag

SEQ ID NO: 803751 - RNA, 20 nt, Artificial Sequence
  Synthetic
ugucuacuuuccuauuacag

SEQ ID NO: 803752 - RNA, 20 nt, Artificial Sequence
  Synthetic
uuauugccuccguauuacag

SEQ ID NO: 803753 - RNA, 20 nt, Artificial Sequence
  Synthetic
uguaauauuuuguauuacag

SEQ ID NO: 803754 - RNA, 20 nt, Artificial Sequence
  Synthetic
aaucuacuugacucuuacag

SEQ ID NO: 803755 - RNA, 20 nt, Artificial Sequence
  Synthetic
ugauacaguaaguguuacag

SEQ ID NO: 803756 - RNA, 20 nt, Artificial Sequence
  Synthetic
ugauuaauacaaauuuacag

SEQ ID NO: 803757 - RNA, 20 nt, Artificial Sequence
  Synthetic
augccucaaagaauuuacag

SEQ ID NO: 803758 - RNA, 20 nt, Artificial Sequence
  Synthetic
agagcuugcauuauuuacag

SEQ ID NO: 803759 - RNA, 20 nt, Artificial Sequence
  Synthetic
uuauaaucgccacuuuacag

SEQ ID NO: 803760 - RNA, 20 nt, Artificial Sequence
  Synthetic
ugauuugugauaguuuacag

SEQ ID NO: 803761 - RNA, 20 nt, Artificial Sequence
  Synthetic
acuaaaagcuuaguuuacag

SEQ ID NO: 803762 - RNA, 20 nt, Artificial Sequence
  Synthetic
uaaaugccuuaauuuuacag

SEQ ID NO: 803763 - RNA, 20 nt, Artificial Sequence
  Synthetic
ucaguauucuauuuuuacag

SEQ ID NO: 803764 - RNA, 20 nt, Artificial Sequence
  Synthetic
aacucaguauucaaaaccag

SEQ ID NO: 803765 - RNA, 20 nt, Artificial Sequence
  Synthetic
acuauaagaagacaaaccag

SEQ ID NO: 803766 - RNA, 20 nt, Artificial Sequence
  Synthetic
cagacuccuuggcaaaccag

SEQ ID NO: 803767 - RNA, 20 nt, Artificial Sequence
  Synthetic
auaaagguggaauaaaccag

SEQ ID NO: 803768 - RNA, 20 nt, Artificial Sequence
  Synthetic
ugauugcaaagaggaaccag

SEQ ID NO: 803769 - RNA, 20 nt, Artificial Sequence
  Synthetic
aguagaaugauaguaaccag

SEQ ID NO: 803770 - RNA, 20 nt, Artificial Sequence
  Synthetic
ccauugggguuuuuaaccag

SEQ ID NO: 803771 - RNA, 20 nt, Artificial Sequence
  Synthetic
uucaaaucccaagacaccag

SEQ ID NO: 803772 - RNA, 20 nt, Artificial Sequence
  Synthetic
ucacugccuggggacaccag

SEQ ID NO: 803773 - RNA, 20 nt, Artificial Sequence
  Synthetic
uucucucuuaaaaccaccag

SEQ ID NO: 803774 - RNA, 20 nt, Artificial Sequence
  Synthetic
cacucauuccugcccaccag

SEQ ID NO: 803775 - RNA, 20 nt, Artificial Sequence
  Synthetic
ucaaccuaggugcccaccag

SEQ ID NO: 803776 - RNA, 20 nt, Artificial Sequence
  Synthetic
cgugugacuccaggcaccag

SEQ ID NO: 803777 - RNA, 20 nt, Artificial Sequence
  Synthetic
ucuugacuacaaugcaccag

SEQ ID NO: 803778 - RNA, 20 nt, Artificial Sequence
  Synthetic
aggaaaguuucuugcaccag

SEQ ID NO: 803779 - RNA, 20 nt, Artificial Sequence
  Synthetic
aaagccuggucccucaccag

SEQ ID NO: 803780 - RNA, 20 nt, Artificial Sequence
  Synthetic
augcaauguucauucaccag

SEQ ID NO: 803781 - RNA, 20 nt, Artificial Sequence
  Synthetic
agcgcaggaguuaagaccag

SEQ ID NO: 803782 - RNA, 20 nt, Artificial Sequence
  Synthetic
aggcagaaagaccagaccag

SEQ ID NO: 803783 - RNA, 20 nt, Artificial Sequence
  Synthetic
agaagaaugcucuagaccag

SEQ ID NO: 803784 - RNA, 20 nt, Artificial Sequence
  Synthetic
aggaaacagaaaaggaccag

SEQ ID NO: 803785 - RNA, 20 nt, Artificial Sequence
  Synthetic
ugagcagugagaaggaccag

SEQ ID NO: 803786 - RNA, 20 nt, Artificial Sequence
  Synthetic
cccucccaucauaggaccag

SEQ ID NO: 803787 - RNA, 20 nt, Artificial Sequence
  Synthetic
augucucauuuggggaccag

SEQ ID NO: 803788 - RNA, 20 nt, Artificial Sequence
  Synthetic
ucacuugaauccuggaccag

SEQ ID NO: 803789 - RNA, 20 nt, Artificial Sequence
  Synthetic
uggaagccaguucugaccag

SEQ ID NO: 803790 - RNA, 20 nt, Artificial Sequence
  Synthetic
uguuuuccauaaaauaccag

SEQ ID NO: 803791 - RNA, 20 nt, Artificial Sequence
  Synthetic
ucaugagacuaucauaccag

SEQ ID NO: 803792 - RNA, 20 nt, Artificial Sequence
  Synthetic
uuguagguagcucauaccag

SEQ ID NO: 803793 - RNA, 20 nt, Artificial Sequence
  Synthetic
uuuuuuuuuauagauaccag

SEQ ID NO: 803794 - RNA, 20 nt, Artificial Sequence
  Synthetic
cauggaaguuuuacuaccag

SEQ ID NO: 803795 - RNA, 20 nt, Artificial Sequence
  Synthetic
uuugcuuuucucucuaccag

SEQ ID NO: 803796 - RNA, 20 nt, Artificial Sequence
  Synthetic
ucacagccgaauucuaccag

SEQ ID NO: 803797 - RNA, 20 nt, Artificial Sequence
  Synthetic
ucacagcugaauucuaccag

SEQ ID NO: 803798 - RNA, 20 nt, Artificial Sequence
  Synthetic
caaacagaagcugguaccag

SEQ ID NO: 803799 - RNA, 20 nt, Artificial Sequence
  Synthetic
aauaaaaggaugguuaccag

SEQ ID NO: 803800 - RNA, 20 nt, Artificial Sequence
  Synthetic
aguagaauggugguuaccag

SEQ ID NO: 803801 - RNA, 20 nt, Artificial Sequence
  Synthetic
aaagagguuccaaaacccag

SEQ ID NO: 803802 - RNA, 20 nt, Artificial Sequence
  Synthetic
cuguugcuuaagccacccag

SEQ ID NO: 803803 - RNA, 20 nt, Artificial Sequence
  Synthetic
ugggcuugagaaucacccag

SEQ ID NO: 803804 - RNA, 20 nt, Artificial Sequence
  Synthetic
caauuccaacccucacccag

SEQ ID NO: 803805 - RNA, 20 nt, Artificial Sequence
  Synthetic
uccucccaucacagacccag

SEQ ID NO: 803806 - RNA, 20 nt, Artificial Sequence
  Synthetic
uaauuucuucauagacccag

SEQ ID NO: 803807 - RNA, 20 nt, Artificial Sequence
  Synthetic
aaaagaagccguggacccag

SEQ ID NO: 803808 - RNA, 20 nt, Artificial Sequence
  Synthetic
auuauugggcauauacccag

SEQ ID NO: 803809 - RNA, 20 nt, Artificial Sequence
  Synthetic
ucaucaggaucaaaccccag

SEQ ID NO: 803810 - RNA, 20 nt, Artificial Sequence
  Synthetic
auaaccuuuuuuccccccag

SEQ ID NO: 803811 - RNA, 20 nt, Artificial Sequence
  Synthetic
uuaugacauucagcccccag

SEQ ID NO: 803812 - RNA, 20 nt, Artificial Sequence
  Synthetic
cagcucagaugagcccccag

SEQ ID NO: 803813 - RNA, 20 nt, Artificial Sequence
  Synthetic
ugcgaccccugaagccccag

SEQ ID NO: 803814 - RNA, 20 nt, Artificial Sequence
  Synthetic
aaaaucuguuuuggccccag

SEQ ID NO: 803815 - RNA, 20 nt, Artificial Sequence
  Synthetic
uccacuaggcagugccccag

SEQ ID NO: 803816 - RNA, 20 nt, Artificial Sequence
  Synthetic
ucuacuaggcagugccccag

SEQ ID NO: 803817 - RNA, 20 nt, Artificial Sequence
  Synthetic
uccgcuaggcagugccccag

SEQ ID NO: 803818 - RNA, 20 nt, Artificial Sequence
  Synthetic
acauguuuuccuguccccag

SEQ ID NO: 803819 - RNA, 20 nt, Artificial Sequence
  Synthetic
uuucucuugagauuccccag

SEQ ID NO: 803820 - RNA, 20 nt, Artificial Sequence
  Synthetic
uccauuuagaauuuccccag

SEQ ID NO: 803821 - RNA, 20 nt, Artificial Sequence
  Synthetic
aaaaucaccauaaagcccag

SEQ ID NO: 803822 - RNA, 20 nt, Artificial Sequence
  Synthetic
cccucccaucacaagcccag

SEQ ID NO: 803823 - RNA, 20 nt, Artificial Sequence
  Synthetic
uggcauggaaccaagcccag

SEQ ID NO: 803824 - RNA, 20 nt, Artificial Sequence
  Synthetic
aaacucuaccaggagcccag

SEQ ID NO: 803825 - RNA, 20 nt, Artificial Sequence
  Synthetic
augugcuuuccauagcccag

SEQ ID NO: 803826 - RNA, 20 nt, Artificial Sequence
  Synthetic
cuccacuccucguagcccag

SEQ ID NO: 803827 - RNA, 20 nt, Artificial Sequence
  Synthetic
cuuuuacuuuugucgcccag

SEQ ID NO: 803828 - RNA, 20 nt, Artificial Sequence
  Synthetic
cgacuugaccgagggcccag

SEQ ID NO: 803829 - RNA, 20 nt, Artificial Sequence
  Synthetic
aaucaaauuuuaaugcccag

SEQ ID NO: 803830 - RNA, 20 nt, Artificial Sequence
  Synthetic
auuuauaaucuacugcccag

SEQ ID NO: 803831 - RNA, 20 nt, Artificial Sequence
  Synthetic
agaauuauacucuugcccag

SEQ ID NO: 803832 - RNA, 20 nt, Artificial Sequence
  Synthetic
aucaguuuuucuuugcccag

SEQ ID NO: 803833 - RNA, 20 nt, Artificial Sequence
  Synthetic
auaaaauauacuaaucccag

SEQ ID NO: 803834 - RNA, 20 nt, Artificial Sequence
  Synthetic
cuugcuuugccuaaucccag

SEQ ID NO: 803835 - RNA, 20 nt, Artificial Sequence
  Synthetic
agaagccuuaugcaucccag

SEQ ID NO: 803836 - RNA, 20 nt, Artificial Sequence
  Synthetic
cucuggaagcuucaucccag

SEQ ID NO: 803837 - RNA, 20 nt, Artificial Sequence
  Synthetic
agucagacuagguaucccag

SEQ ID NO: 803838 - RNA, 20 nt, Artificial Sequence
  Synthetic
uugcuuuugcuguaucccag

SEQ ID NO: 803839 - RNA, 20 nt, Artificial Sequence
  Synthetic
auacauuccaagacucccag

SEQ ID NO: 803840 - RNA, 20 nt, Artificial Sequence
  Synthetic
ugggucucagggacucccag

SEQ ID NO: 803841 - RNA, 20 nt, Artificial Sequence
  Synthetic
uaaugauggucagcucccag

SEQ ID NO: 803842 - RNA, 20 nt, Artificial Sequence
  Synthetic
aaaauuuucauagcucccag

SEQ ID NO: 803843 - RNA, 20 nt, Artificial Sequence
  Synthetic
aaguuaggaaaaugucccag

SEQ ID NO: 803844 - RNA, 20 nt, Artificial Sequence
  Synthetic
cauuucuaucaaauucccag

SEQ ID NO: 803845 - RNA, 20 nt, Artificial Sequence
  Synthetic
aggcagugaacuauucccag

SEQ ID NO: 803846 - RNA, 20 nt, Artificial Sequence
  Synthetic
cugggaaauguaguucccag

SEQ ID NO: 803847 - RNA, 20 nt, Artificial Sequence
  Synthetic
augaguucacaguuucccag

SEQ ID NO: 803848 - RNA, 20 nt, Artificial Sequence
  Synthetic
uaauaauuaaaacaagccag

SEQ ID NO: 803849 - RNA, 20 nt, Artificial Sequence
  Synthetic
cagcgagaauuucaagccag

SEQ ID NO: 803850 - RNA, 20 nt, Artificial Sequence
  Synthetic
auggccagagcagaagccag

SEQ ID NO: 803851 - RNA, 20 nt, Artificial Sequence
  Synthetic
caaaaaaucaaugaagccag

SEQ ID NO: 803852 - RNA, 20 nt, Artificial Sequence
  Synthetic
ccucuauauauugaagccag

SEQ ID NO: 803853 - RNA, 20 nt, Artificial Sequence
  Synthetic
uucuucuauguugaagccag

SEQ ID NO: 803854 - RNA, 20 nt, Artificial Sequence
  Synthetic
uugaacaauauauaagccag

SEQ ID NO: 803855 - RNA, 20 nt, Artificial Sequence
  Synthetic
caggaguggaccacagccag

SEQ ID NO: 803856 - RNA, 20 nt, Artificial Sequence
  Synthetic
uaguuucacaaagcagccag

SEQ ID NO: 803857 - RNA, 20 nt, Artificial Sequence
  Synthetic
aacucagccugcucagccag

SEQ ID NO: 803858 - RNA, 20 nt, Artificial Sequence
  Synthetic
auacagugguucucagccag

SEQ ID NO: 803859 - RNA, 20 nt, Artificial Sequence
  Synthetic
aaaagggugcauucagccag

SEQ ID NO: 803860 - RNA, 20 nt, Artificial Sequence
  Synthetic
aacaacuccugccgagccag

SEQ ID NO: 803861 - RNA, 20 nt, Artificial Sequence
  Synthetic
agcgacauggauggagccag

SEQ ID NO: 803862 - RNA, 20 nt, Artificial Sequence
  Synthetic
acuuacagggaaaaggccag

SEQ ID NO: 803863 - RNA, 20 nt, Artificial Sequence
  Synthetic
ucauaaacaauagaggccag

SEQ ID NO: 803864 - RNA, 20 nt, Artificial Sequence
  Synthetic
uuucuaaccuccuaggccag

SEQ ID NO: 803865 - RNA, 20 nt, Artificial Sequence
  Synthetic
uccacagaucucuaggccag

SEQ ID NO: 803866 - RNA, 20 nt, Artificial Sequence
  Synthetic
uugguccugccuugggccag

SEQ ID NO: 803867 - RNA, 20 nt, Artificial Sequence
  Synthetic
auuguuuaaaaaauggccag

SEQ ID NO: 803868 - RNA, 20 nt, Artificial Sequence
  Synthetic
ugugcaauagguauggccag

SEQ ID NO: 803869 - RNA, 20 nt, Artificial Sequence
  Synthetic
cagacuauuaggguggccag

SEQ ID NO: 803870 - RNA, 20 nt, Artificial Sequence
  Synthetic
uccagccagccauuggccag

SEQ ID NO: 803871 - RNA, 20 nt, Artificial Sequence
  Synthetic
uugcuuguaaucuuggccag

SEQ ID NO: 803872 - RNA, 20 nt, Artificial Sequence
  Synthetic
aagcacauuuuaaaugccag

SEQ ID NO: 803873 - RNA, 20 nt, Artificial Sequence
  Synthetic
uauauauauaucaaugccag

SEQ ID NO: 803874 - RNA, 20 nt, Artificial Sequence
  Synthetic
uggcucuaacuagaugccag

SEQ ID NO: 803875 - RNA, 20 nt, Artificial Sequence
  Synthetic
aaaucaauuaaauaugccag

SEQ ID NO: 803876 - RNA, 20 nt, Artificial Sequence
  Synthetic
aguagaaagguaguugccag

SEQ ID NO: 803877 - RNA, 20 nt, Artificial Sequence
  Synthetic
acuggacuggugguugccag

SEQ ID NO: 803878 - RNA, 20 nt, Artificial Sequence
  Synthetic
cugaacucuuugguugccag

SEQ ID NO: 803879 - RNA, 20 nt, Artificial Sequence
  Synthetic
cucuguccauuauuugccag

SEQ ID NO: 803880 - RNA, 20 nt, Artificial Sequence
  Synthetic
aaaaacagauucaaauccag

SEQ ID NO: 803881 - RNA, 20 nt, Artificial Sequence
  Synthetic
ugagacccccaagaauccag

SEQ ID NO: 803882 - RNA, 20 nt, Artificial Sequence
  Synthetic
acuucuuugccagaauccag

SEQ ID NO: 803883 - RNA, 20 nt, Artificial Sequence
  Synthetic
uugcccagguuggaauccag

SEQ ID NO: 803884 - RNA, 20 nt, Artificial Sequence
  Synthetic
auauacaugccugaauccag

SEQ ID NO: 803885 - RNA, 20 nt, Artificial Sequence
  Synthetic
uuuaccaaagguccauccag

SEQ ID NO: 803886 - RNA, 20 nt, Artificial Sequence
  Synthetic
ucagcuuagaaaagauccag

SEQ ID NO: 803887 - RNA, 20 nt, Artificial Sequence
  Synthetic
uuucaacuuuuaagauccag

SEQ ID NO: 803888 - RNA, 20 nt, Artificial Sequence
  Synthetic
augucaugggagggauccag

SEQ ID NO: 803889 - RNA, 20 nt, Artificial Sequence
  Synthetic
uuguugugggagggauccag

SEQ ID NO: 803890 - RNA, 20 nt, Artificial Sequence
  Synthetic
ccucuucuguuucuauccag

SEQ ID NO: 803891 - RNA, 20 nt, Artificial Sequence
  Synthetic
aauuggcccuuaguauccag

SEQ ID NO: 803892 - RNA, 20 nt, Artificial Sequence
  Synthetic
agcuggcuaaccguauccag

SEQ ID NO: 803893 - RNA, 20 nt, Artificial Sequence
  Synthetic
uguaaucuuccuuuauccag

SEQ ID NO: 803894 - RNA, 20 nt, Artificial Sequence
  Synthetic
uguaaacauauaaacuccag

SEQ ID NO: 803895 - RNA, 20 nt, Artificial Sequence
  Synthetic
uuuccuacuuaguccuccag

SEQ ID NO: 803896 - RNA, 20 nt, Artificial Sequence
  Synthetic
cuucuuaaggcuuccuccag

SEQ ID NO: 803897 - RNA, 20 nt, Artificial Sequence
  Synthetic
ugagcacauaaaagcuccag

SEQ ID NO: 803898 - RNA, 20 nt, Artificial Sequence
  Synthetic
ucaagcagacaaaucuccag

SEQ ID NO: 803899 - RNA, 20 nt, Artificial Sequence
  Synthetic
uuugguauccccaucuccag

SEQ ID NO: 803900 - RNA, 20 nt, Artificial Sequence
  Synthetic
aauggcaguguuaucuccag

SEQ ID NO: 803901 - RNA, 20 nt, Artificial Sequence
  Synthetic
uguugugaccagcucuccag

SEQ ID NO: 803902 - RNA, 20 nt, Artificial Sequence
  Synthetic
agcuucaaguucuucuccag

SEQ ID NO: 803903 - RNA, 20 nt, Artificial Sequence
  Synthetic
aacucaguuuuugaguccag

SEQ ID NO: 803904 - RNA, 20 nt, Artificial Sequence
  Synthetic
ugccuucugaaauaguccag

SEQ ID NO: 803905 - RNA, 20 nt, Artificial Sequence
  Synthetic
agaaacagaaaguaguccag

SEQ ID NO: 803906 - RNA, 20 nt, Artificial Sequence
  Synthetic
cagagggagcagccguccag

SEQ ID NO: 803907 - RNA, 20 nt, Artificial Sequence
  Synthetic
ccaaaaaaaguuccguccag

SEQ ID NO: 803908 - RNA, 20 nt, Artificial Sequence
  Synthetic
uugaauauguauugguccag

SEQ ID NO: 803909 - RNA, 20 nt, Artificial Sequence
  Synthetic
ccacauacaugcauguccag

SEQ ID NO: 803910 - RNA, 20 nt, Artificial Sequence
  Synthetic
acaacuaauaauguguccag

SEQ ID NO: 803911 - RNA, 20 nt, Artificial Sequence
  Synthetic
auccacugagcuguguccag

SEQ ID NO: 803912 - RNA, 20 nt, Artificial Sequence
  Synthetic
aguuacuuacugaauuccag

SEQ ID NO: 803913 - RNA, 20 nt, Artificial Sequence
  Synthetic
uugagagguucacauuccag

SEQ ID NO: 803914 - RNA, 20 nt, Artificial Sequence
  Synthetic
aaggucagcauccauuccag

SEQ ID NO: 803915 - RNA, 20 nt, Artificial Sequence
  Synthetic
agcugugaaacagauuccag

SEQ ID NO: 803916 - RNA, 20 nt, Artificial Sequence
  Synthetic
aguuuuccaggagauuccag

SEQ ID NO: 803917 - RNA, 20 nt, Artificial Sequence
  Synthetic
ucuaccacagaugauuccag

SEQ ID NO: 803918 - RNA, 20 nt, Artificial Sequence
  Synthetic
aaggcugaaaaauauuccag

SEQ ID NO: 803919 - RNA, 20 nt, Artificial Sequence
  Synthetic
aacuuuggaggcuauuccag

SEQ ID NO: 803920 - RNA, 20 nt, Artificial Sequence
  Synthetic
agacauccagcuuauuccag

SEQ ID NO: 803921 - RNA, 20 nt, Artificial Sequence
  Synthetic
auucaagaauguuauuccag

SEQ ID NO: 803922 - RNA, 20 nt, Artificial Sequence
  Synthetic
cuucuuuuuccaccuuccag

SEQ ID NO: 803923 - RNA, 20 nt, Artificial Sequence
  Synthetic
ugcccaugaagaccuuccag

SEQ ID NO: 803924 - RNA, 20 nt, Artificial Sequence
  Synthetic
cucugggaugaagcuuccag

SEQ ID NO: 803925 - RNA, 20 nt, Artificial Sequence
  Synthetic
aaguuguaaauugcuuccag

SEQ ID NO: 803926 - RNA, 20 nt, Artificial Sequence
  Synthetic
agaugaaagucaucuuccag

SEQ ID NO: 803927 - RNA, 20 nt, Artificial Sequence
  Synthetic
uuccauuuucauucuuccag

SEQ ID NO: 803928 - RNA, 20 nt, Artificial Sequence
  Synthetic
ccaugggucagaaguuccag

SEQ ID NO: 803929 - RNA, 20 nt, Artificial Sequence
  Synthetic
ucaaacuguagauguuccag

SEQ ID NO: 803930 - RNA, 20 nt, Artificial Sequence
  Synthetic
auugaguggcacuguuccag

SEQ ID NO: 803931 - RNA, 20 nt, Artificial Sequence
  Synthetic
uuauuuuauuaaauuuccag

SEQ ID NO: 803932 - RNA, 20 nt, Artificial Sequence
  Synthetic
auagaagcuguacuuuccag

SEQ ID NO: 803933 - RNA, 20 nt, Artificial Sequence
  Synthetic
uaccuaucagugguuuccag

SEQ ID NO: 803934 - RNA, 20 nt, Artificial Sequence
  Synthetic
aauagaauggugguuuccag

SEQ ID NO: 803935 - RNA, 20 nt, Artificial Sequence
  Synthetic
caaacuauguauguuuccag

SEQ ID NO: 803936 - RNA, 20 nt, Artificial Sequence
  Synthetic
uaccagucaaguguuuccag

SEQ ID NO: 803937 - RNA, 20 nt, Artificial Sequence
  Synthetic
auauucaugaaauuuuccag

SEQ ID NO: 803938 - RNA, 20 nt, Artificial Sequence
  Synthetic
ugccuaacucaguuuuccag

SEQ ID NO: 803939 - RNA, 20 nt, Artificial Sequence
  Synthetic
ugagacuuccauuuuuccag

SEQ ID NO: 803940 - RNA, 20 nt, Artificial Sequence
  Synthetic
cuguaucuugcuuuuuccag

SEQ ID NO: 803941 - RNA, 20 nt, Artificial Sequence
  Synthetic
uggaaagaaaaaaaaagcag

SEQ ID NO: 803942 - RNA, 20 nt, Artificial Sequence
  Synthetic
uguacuuugcugaaaagcag

SEQ ID NO: 803943 - RNA, 20 nt, Artificial Sequence
  Synthetic
augcauuuacuucaaagcag

SEQ ID NO: 803944 - RNA, 20 nt, Artificial Sequence
  Synthetic
ucugcuugaaaauaaagcag

SEQ ID NO: 803945 - RNA, 20 nt, Artificial Sequence
  Synthetic
uuauagccuagcuaaagcag

SEQ ID NO: 803946 - RNA, 20 nt, Artificial Sequence
  Synthetic
cuauagcguagcuaaagcag

SEQ ID NO: 803947 - RNA, 20 nt, Artificial Sequence
  Synthetic
auauauaaaacuccaagcag

SEQ ID NO: 803948 - RNA, 20 nt, Artificial Sequence
  Synthetic
ucauugucugcuccaagcag

SEQ ID NO: 803949 - RNA, 20 nt, Artificial Sequence
  Synthetic
uaauaaugagagucaagcag

SEQ ID NO: 803950 - RNA, 20 nt, Artificial Sequence
  Synthetic
ugacccuggaaaggaagcag

SEQ ID NO: 803951 - RNA, 20 nt, Artificial Sequence
  Synthetic
ugcaggcuuaauggaagcag

SEQ ID NO: 803952 - RNA, 20 nt, Artificial Sequence
  Synthetic
acaguagcaacuggaagcag

SEQ ID NO: 803953 - RNA, 20 nt, Artificial Sequence
  Synthetic
aaaugaauuuguggaagcag

SEQ ID NO: 803954 - RNA, 20 nt, Artificial Sequence
  Synthetic
aagaguaccuauugaagcag

SEQ ID NO: 803955 - RNA, 20 nt, Artificial Sequence
  Synthetic
auugcacauuguugaagcag

SEQ ID NO: 803956 - RNA, 20 nt, Artificial Sequence
  Synthetic
aaagguaaaagaauaagcag

SEQ ID NO: 803957 - RNA, 20 nt, Artificial Sequence
  Synthetic
agcaaacaugacauaagcag

SEQ ID NO: 803958 - RNA, 20 nt, Artificial Sequence
  Synthetic
uguuacaaggagauaagcag

SEQ ID NO: 803959 - RNA, 20 nt, Artificial Sequence
  Synthetic
agacaacaaaguauaagcag

SEQ ID NO: 803960 - RNA, 20 nt, Artificial Sequence
  Synthetic
aauuccaagguuauaagcag

SEQ ID NO: 803961 - RNA, 20 nt, Artificial Sequence
  Synthetic
uguacuuuugggguaagcag

SEQ ID NO: 803962 - RNA, 20 nt, Artificial Sequence
  Synthetic
aguuuaauuccuuuaagcag

SEQ ID NO: 803963 - RNA, 20 nt, Artificial Sequence
  Synthetic
uacaggaaccaaaacagcag

SEQ ID NO: 803964 - RNA, 20 nt, Artificial Sequence
  Synthetic
uugggauauauacccagcag

SEQ ID NO: 803965 - RNA, 20 nt, Artificial Sequence
  Synthetic
uuuggguauauacccagcag

SEQ ID NO: 803966 - RNA, 20 nt, Artificial Sequence
  Synthetic
ugggagacaccucccagcag

SEQ ID NO: 803967 - RNA, 20 nt, Artificial Sequence
  Synthetic
ugaagagagguucccagcag

SEQ ID NO: 803968 - RNA, 20 nt, Artificial Sequence
  Synthetic
ucuaucuucaaagccagcag

SEQ ID NO: 803969 - RNA, 20 nt, Artificial Sequence
  Synthetic
cuggccacccaagccagcag

SEQ ID NO: 803970 - RNA, 20 nt, Artificial Sequence
  Synthetic
uagugguggauguccagcag

SEQ ID NO: 803971 - RNA, 20 nt, Artificial Sequence
  Synthetic
aagcaguaggugagcagcag

SEQ ID NO: 803972 - RNA, 20 nt, Artificial Sequence
  Synthetic
aagggucucaguagcagcag

SEQ ID NO: 803973 - RNA, 20 nt, Artificial Sequence
  Synthetic
uuuuagagugcaugcagcag

SEQ ID NO: 803974 - RNA, 20 nt, Artificial Sequence
  Synthetic
uuccagcagaccugcagcag

SEQ ID NO: 803975 - RNA, 20 nt, Artificial Sequence
  Synthetic
augugauuugucugcagcag

SEQ ID NO: 803976 - RNA, 20 nt, Artificial Sequence
  Synthetic
accuucuaucagcucagcag

SEQ ID NO: 803977 - RNA, 20 nt, Artificial Sequence
  Synthetic
cauaggagaguuuucagcag

SEQ ID NO: 803978 - RNA, 20 nt, Artificial Sequence
  Synthetic
ccuguuucuaagaagagcag

SEQ ID NO: 803979 - RNA, 20 nt, Artificial Sequence
  Synthetic
agaaggcgaaggaagagcag

SEQ ID NO: 803980 - RNA, 20 nt, Artificial Sequence
  Synthetic
cugcguuuggcacagagcag

SEQ ID NO: 803981 - RNA, 20 nt, Artificial Sequence
  Synthetic
auauggcaucugcagagcag

SEQ ID NO: 803982 - RNA, 20 nt, Artificial Sequence
  Synthetic
ccauugaugagucagagcag

SEQ ID NO: 803983 - RNA, 20 nt, Artificial Sequence
  Synthetic
uuucccuuucuucagagcag

SEQ ID NO: 803984 - RNA, 20 nt, Artificial Sequence
  Synthetic
ucagcggaauaggagagcag

SEQ ID NO: 803985 - RNA, 20 nt, Artificial Sequence
  Synthetic
ucacccaggcgggagagcag

SEQ ID NO: 803986 - RNA, 20 nt, Artificial Sequence
  Synthetic
cagugaggaguugagagcag

SEQ ID NO: 803987 - RNA, 20 nt, Artificial Sequence
  Synthetic
uccuugaacaccuagagcag

SEQ ID NO: 803988 - RNA, 20 nt, Artificial Sequence
  Synthetic
uauauacuuuuguagagcag

SEQ ID NO: 803989 - RNA, 20 nt, Artificial Sequence
  Synthetic
agugaacuucacaggagcag

SEQ ID NO: 803990 - RNA, 20 nt, Artificial Sequence
  Synthetic
uaaugccuugggaggagcag

SEQ ID NO: 803991 - RNA, 20 nt, Artificial Sequence
  Synthetic
cacuuggguaugaggagcag

SEQ ID NO: 803992 - RNA, 20 nt, Artificial Sequence
  Synthetic
ugagagaccauauggagcag

SEQ ID NO: 803993 - RNA, 20 nt, Artificial Sequence
  Synthetic
caauaaugguuucugagcag

SEQ ID NO: 803994 - RNA, 20 nt, Artificial Sequence
  Synthetic
augcaggagcgugugagcag

SEQ ID NO: 803995 - RNA, 20 nt, Artificial Sequence
  Synthetic
ucucucauuuccuugagcag

SEQ ID NO: 803996 - RNA, 20 nt, Artificial Sequence
  Synthetic
ucucuuauuuccuugagcag

SEQ ID NO: 803997 - RNA, 20 nt, Artificial Sequence
  Synthetic
ucuuuuauuuccuugagcag

SEQ ID NO: 803998 - RNA, 20 nt, Artificial Sequence
  Synthetic
acagcuguucucuugagcag

SEQ ID NO: 803999 - RNA, 20 nt, Artificial Sequence
  Synthetic
caccagaagauuuugagcag

SEQ ID NO: 804000 - RNA, 20 nt, Artificial Sequence
  Synthetic
ccauaaaauucuaauagcag

SEQ ID NO: 804001 - RNA, 20 nt, Artificial Sequence
  Synthetic
uggccauacuguaauagcag

SEQ ID NO: 804002 - RNA, 20 nt, Artificial Sequence
  Synthetic
cccuaggcugcacauagcag

SEQ ID NO: 804003 - RNA, 20 nt, Artificial Sequence
  Synthetic
cuucaugacacuuauagcag

SEQ ID NO: 804004 - RNA, 20 nt, Artificial Sequence
  Synthetic
uaggaagauaaaucuagcag

SEQ ID NO: 804005 - RNA, 20 nt, Artificial Sequence
  Synthetic
caacuguauucaaguagcag

SEQ ID NO: 804006 - RNA, 20 nt, Artificial Sequence
  Synthetic
aaguccuaagacaguagcag

SEQ ID NO: 804007 - RNA, 20 nt, Artificial Sequence
  Synthetic
cuaggacauaguaguagcag

SEQ ID NO: 804008 - RNA, 20 nt, Artificial Sequence
  Synthetic
acacacacuugacguagcag

SEQ ID NO: 804009 - RNA, 20 nt, Artificial Sequence
  Synthetic
ucauugucuagauguagcag

SEQ ID NO: 804010 - RNA, 20 nt, Artificial Sequence
  Synthetic
auuaaacagauuuguagcag

SEQ ID NO: 804011 - RNA, 20 nt, Artificial Sequence
  Synthetic
acacucacaaucauuagcag

SEQ ID NO: 804012 - RNA, 20 nt, Artificial Sequence
  Synthetic
acuaagcccaaaguuagcag

SEQ ID NO: 804013 - RNA, 20 nt, Artificial Sequence
  Synthetic
uggaauuuacauuuuagcag

SEQ ID NO: 804014 - RNA, 20 nt, Artificial Sequence
  Synthetic
agcuguaacagucaccgcag

SEQ ID NO: 804015 - RNA, 20 nt, Artificial Sequence
  Synthetic
augaaaacauauggccgcag

SEQ ID NO: 804016 - RNA, 20 nt, Artificial Sequence
  Synthetic
uugcccaggcuggagcgcag

SEQ ID NO: 804017 - RNA, 20 nt, Artificial Sequence
  Synthetic
ucgcccagguuggagcgcag

SEQ ID NO: 804018 - RNA, 20 nt, Artificial Sequence
  Synthetic
caaaaauuagccaggcgcag

SEQ ID NO: 804019 - RNA, 20 nt, Artificial Sequence
  Synthetic
aaauuccuggccaggcgcag

SEQ ID NO: 804020 - RNA, 20 nt, Artificial Sequence
  Synthetic
auguaaaacuucaggcgcag

SEQ ID NO: 804021 - RNA, 20 nt, Artificial Sequence
  Synthetic
ccacccauggccgggcgcag

SEQ ID NO: 804022 - RNA, 20 nt, Artificial Sequence
  Synthetic
uaauaauuggccgggcgcag

SEQ ID NO: 804023 - RNA, 20 nt, Artificial Sequence
  Synthetic
uugagaauucccuggcgcag

SEQ ID NO: 804024 - RNA, 20 nt, Artificial Sequence
  Synthetic
uggaaaacaaaaaaaggcag

SEQ ID NO: 804025 - RNA, 20 nt, Artificial Sequence
  Synthetic
cuugcccuuuuaaaaggcag

SEQ ID NO: 804026 - RNA, 20 nt, Artificial Sequence
  Synthetic
cgcuugaaccugaaaggcag

SEQ ID NO: 804027 - RNA, 20 nt, Artificial Sequence
  Synthetic
auaagugauacuaaaggcag

SEQ ID NO: 804028 - RNA, 20 nt, Artificial Sequence
  Synthetic
cuacaaaggauacaaggcag

SEQ ID NO: 804029 - RNA, 20 nt, Artificial Sequence
  Synthetic
agacggagccgagaaggcag

SEQ ID NO: 804030 - RNA, 20 nt, Artificial Sequence
  Synthetic
cuauauccaugagaaggcag

SEQ ID NO: 804031 - RNA, 20 nt, Artificial Sequence
  Synthetic
cacuugaacguggaaggcag

SEQ ID NO: 804032 - RNA, 20 nt, Artificial Sequence
  Synthetic
agagcuugggaauaaggcag

SEQ ID NO: 804033 - RNA, 20 nt, Artificial Sequence
  Synthetic
uggaacuggguaacaggcag

SEQ ID NO: 804034 - RNA, 20 nt, Artificial Sequence
  Synthetic
caccaucaauacacaggcag

SEQ ID NO: 804035 - RNA, 20 nt, Artificial Sequence
  Synthetic
uuugacugggagacaggcag

SEQ ID NO: 804036 - RNA, 20 nt, Artificial Sequence
  Synthetic
ugaugauggccuacaggcag

SEQ ID NO: 804037 - RNA, 20 nt, Artificial Sequence
  Synthetic
uggaaggacaucccaggcag

SEQ ID NO: 804038 - RNA, 20 nt, Artificial Sequence
  Synthetic
aaaagaagcaggccaggcag

SEQ ID NO: 804039 - RNA, 20 nt, Artificial Sequence
  Synthetic
cuguugguccaagcaggcag

SEQ ID NO: 804040 - RNA, 20 nt, Artificial Sequence
  Synthetic
accaagggaauggcaggcag

SEQ ID NO: 804041 - RNA, 20 nt, Artificial Sequence
  Synthetic
cuguccugaauugcaggcag

SEQ ID NO: 804042 - RNA, 20 nt, Artificial Sequence
  Synthetic
cugaagacuauuucaggcag

SEQ ID NO: 804043 - RNA, 20 nt, Artificial Sequence
  Synthetic
agcuugaacccaagaggcag

SEQ ID NO: 804044 - RNA, 20 nt, Artificial Sequence
  Synthetic
auggaaguagcucgaggcag

SEQ ID NO: 804045 - RNA, 20 nt, Artificial Sequence
  Synthetic
cgcuucaacccaggaggcag

SEQ ID NO: 804046 - RNA, 20 nt, Artificial Sequence
  Synthetic
cacuugaacccaggaggcag

SEQ ID NO: 804047 - RNA, 20 nt, Artificial Sequence
  Synthetic
cccuugaacccaggaggcag

SEQ ID NO: 804048 - RNA, 20 nt, Artificial Sequence
  Synthetic
cgcuugaacccaggaggcag

SEQ ID NO: 804049 - RNA, 20 nt, Artificial Sequence
  Synthetic
cgcuugaacguaggaggcag

SEQ ID NO: 804050 - RNA, 20 nt, Artificial Sequence
  Synthetic
ugcucgaacccgggaggcag

SEQ ID NO: 804051 - RNA, 20 nt, Artificial Sequence
  Synthetic
cacuugaacccgggaggcag

SEQ ID NO: 804052 - RNA, 20 nt, Artificial Sequence
  Synthetic
cgcuugaacccgggaggcag

SEQ ID NO: 804053 - RNA, 20 nt, Artificial Sequence
  Synthetic
cauuugaacccgggaggcag

SEQ ID NO: 804054 - RNA, 20 nt, Artificial Sequence
  Synthetic
cuuuugaacccgggaggcag

SEQ ID NO: 804055 - RNA, 20 nt, Artificial Sequence
  Synthetic
cacuugaacucgggaggcag

SEQ ID NO: 804056 - RNA, 20 nt, Artificial Sequence
  Synthetic
cccaacuacucgggaggcag

SEQ ID NO: 804057 - RNA, 20 nt, Artificial Sequence
  Synthetic
cgcuugagcuggggaggcag

SEQ ID NO: 804058 - RNA, 20 nt, Artificial Sequence
  Synthetic
agcuugaacaugggaggcag

SEQ ID NO: 804059 - RNA, 20 nt, Artificial Sequence
  Synthetic
cgcuugaaucugggaggcag

SEQ ID NO: 804060 - RNA, 20 nt, Artificial Sequence
  Synthetic
cccagcacuuugggaggcag

SEQ ID NO: 804061 - RNA, 20 nt, Artificial Sequence
  Synthetic
ugcuugaagccuggaggcag

SEQ ID NO: 804062 - RNA, 20 nt, Artificial Sequence
  Synthetic
uacucaggaggcugaggcag

SEQ ID NO: 804063 - RNA, 20 nt, Artificial Sequence
  Synthetic
uacuucggaggcugaggcag

SEQ ID NO: 804064 - RNA, 20 nt, Artificial Sequence
  Synthetic
uacuugggaggcugaggcag

SEQ ID NO: 804065 - RNA, 20 nt, Artificial Sequence
  Synthetic
agacaagaaaagugaggcag

SEQ ID NO: 804066 - RNA, 20 nt, Artificial Sequence
  Synthetic
aaggguugguguugaggcag

SEQ ID NO: 804067 - RNA, 20 nt, Artificial Sequence
  Synthetic
uagaacuggguaauaggcag

SEQ ID NO: 804068 - RNA, 20 nt, Artificial Sequence
  Synthetic
auccucugaaaucuaggcag

SEQ ID NO: 804069 - RNA, 20 nt, Artificial Sequence
  Synthetic
auccucugaauucuaggcag

SEQ ID NO: 804070 - RNA, 20 nt, Artificial Sequence
  Synthetic
uuuuugguugguguaggcag

SEQ ID NO: 804071 - RNA, 20 nt, Artificial Sequence
  Synthetic
uggagaugucaauuaggcag

SEQ ID NO: 804072 - RNA, 20 nt, Artificial Sequence
  Synthetic
auagacagcagggacggcag

SEQ ID NO: 804073 - RNA, 20 nt, Artificial Sequence
  Synthetic
cgcuugaacccgggcggcag

SEQ ID NO: 804074 - RNA, 20 nt, Artificial Sequence
  Synthetic
caucuuuguaaaaagggcag

SEQ ID NO: 804075 - RNA, 20 nt, Artificial Sequence
  Synthetic
agguaaauauggaagggcag

SEQ ID NO: 804076 - RNA, 20 nt, Artificial Sequence
  Synthetic
acagaagcaauacagggcag

SEQ ID NO: 804077 - RNA, 20 nt, Artificial Sequence
  Synthetic
cuaaucuggcaagagggcag

SEQ ID NO: 804078 - RNA, 20 nt, Artificial Sequence
  Synthetic
aucccuggugaggagggcag

SEQ ID NO: 804079 - RNA, 20 nt, Artificial Sequence
  Synthetic
cuggcucuaggggagggcag

SEQ ID NO: 804080 - RNA, 20 nt, Artificial Sequence
  Synthetic
uugcccaggcuggagggcag

SEQ ID NO: 804081 - RNA, 20 nt, Artificial Sequence
  Synthetic
uaaaagcuucaugagggcag

SEQ ID NO: 804082 - RNA, 20 nt, Artificial Sequence
  Synthetic
aauggcgugaacccgggcag

SEQ ID NO: 804083 - RNA, 20 nt, Artificial Sequence
  Synthetic
augaguuuagguaggggcag

SEQ ID NO: 804084 - RNA, 20 nt, Artificial Sequence
  Synthetic
aggagucggggagggggcag

SEQ ID NO: 804085 - RNA, 20 nt, Artificial Sequence
  Synthetic
cucgaaccuggugggggcag

SEQ ID NO: 804086 - RNA, 20 nt, Artificial Sequence
  Synthetic
aaaugcauaccauggggcag

SEQ ID NO: 804087 - RNA, 20 nt, Artificial Sequence
  Synthetic
aaaagcaaaaacuggggcag

SEQ ID NO: 804088 - RNA, 20 nt, Artificial Sequence
  Synthetic
uauuggcaucuaaugggcag

SEQ ID NO: 804089 - RNA, 20 nt, Artificial Sequence
  Synthetic
uauguggaaagcaugggcag

SEQ ID NO: 804090 - RNA, 20 nt, Artificial Sequence
  Synthetic
caugacauuggucugggcag

SEQ ID NO: 804091 - RNA, 20 nt, Artificial Sequence
  Synthetic
ugcugucaucaagugggcag

SEQ ID NO: 804092 - RNA, 20 nt, Artificial Sequence
  Synthetic
uucacagauggggugggcag

SEQ ID NO: 804093 - RNA, 20 nt, Artificial Sequence
  Synthetic
uccaggauggcauugggcag

SEQ ID NO: 804094 - RNA, 20 nt, Artificial Sequence
  Synthetic
ucaacaggagacuugggcag

SEQ ID NO: 804095 - RNA, 20 nt, Artificial Sequence
  Synthetic
cauuaauagaaacauggcag

SEQ ID NO: 804096 - RNA, 20 nt, Artificial Sequence
  Synthetic
cuauucaagaucucuggcag

SEQ ID NO: 804097 - RNA, 20 nt, Artificial Sequence
  Synthetic
uauuauuuucuaaguggcag

SEQ ID NO: 804098 - RNA, 20 nt, Artificial Sequence
  Synthetic
ugugguagugaacguggcag

SEQ ID NO: 804099 - RNA, 20 nt, Artificial Sequence
  Synthetic
uauaaguuagcugguggcag

SEQ ID NO: 804100 - RNA, 20 nt, Artificial Sequence
  Synthetic
uugggagagggugguggcag

SEQ ID NO: 804101 - RNA, 20 nt, Artificial Sequence
  Synthetic
agggacuaugcauguggcag

SEQ ID NO: 804102 - RNA, 20 nt, Artificial Sequence
  Synthetic
aaagaaggcaacuguggcag

SEQ ID NO: 804103 - RNA, 20 nt, Artificial Sequence
  Synthetic
auaagacuguagguuggcag

SEQ ID NO: 804104 - RNA, 20 nt, Artificial Sequence
  Synthetic
ugagucaggcaauuuggcag

SEQ ID NO: 804105 - RNA, 20 nt, Artificial Sequence
  Synthetic
aauaugaaaaaaaaaugcag

SEQ ID NO: 804106 - RNA, 20 nt, Artificial Sequence
  Synthetic
uugauuaggccaaaaugcag

SEQ ID NO: 804107 - RNA, 20 nt, Artificial Sequence
  Synthetic
aacaaguuaggaaaaugcag

SEQ ID NO: 804108 - RNA, 20 nt, Artificial Sequence
  Synthetic
ucuuuuccccucaaaugcag

SEQ ID NO: 804109 - RNA, 20 nt, Artificial Sequence
  Synthetic
cuaaauacccuacaaugcag

SEQ ID NO: 804110 - RNA, 20 nt, Artificial Sequence
  Synthetic
aaucaaguuaagcaaugcag

SEQ ID NO: 804111 - RNA, 20 nt, Artificial Sequence
  Synthetic
ucagucugauggcaaugcag

SEQ ID NO: 804112 - RNA, 20 nt, Artificial Sequence
  Synthetic
uggacuaucugagaaugcag

SEQ ID NO: 804113 - RNA, 20 nt, Artificial Sequence
  Synthetic
ucacccaggcuggaaugcag

SEQ ID NO: 804114 - RNA, 20 nt, Artificial Sequence
  Synthetic
uugcccaggcuggaaugcag

SEQ ID NO: 804115 - RNA, 20 nt, Artificial Sequence
  Synthetic
ucacucaggcuggaaugcag

SEQ ID NO: 804116 - RNA, 20 nt, Artificial Sequence
  Synthetic
uugcccuggcuggaaugcag

SEQ ID NO: 804117 - RNA, 20 nt, Artificial Sequence
  Synthetic
aggaaacaaauaacaugcag

SEQ ID NO: 804118 - RNA, 20 nt, Artificial Sequence
  Synthetic
agucccugagacccaugcag

SEQ ID NO: 804119 - RNA, 20 nt, Artificial Sequence
  Synthetic
ccagugucaauaagaugcag

SEQ ID NO: 804120 - RNA, 20 nt, Artificial Sequence
  Synthetic
cuaagaugggggagaugcag

SEQ ID NO: 804121 - RNA, 20 nt, Artificial Sequence
  Synthetic
ugcucuaggagaauaugcag

SEQ ID NO: 804122 - RNA, 20 nt, Artificial Sequence
  Synthetic
uuuuuugcuaaccuaugcag

SEQ ID NO: 804123 - RNA, 20 nt, Artificial Sequence
  Synthetic
cugcagaaacagcuaugcag

SEQ ID NO: 804124 - RNA, 20 nt, Artificial Sequence
  Synthetic
aaaugacaaaaaguaugcag

SEQ ID NO: 804125 - RNA, 20 nt, Artificial Sequence
  Synthetic
cauucugcuagauacugcag

SEQ ID NO: 804126 - RNA, 20 nt, Artificial Sequence
  Synthetic
ugaagcuaucuuuacugcag

SEQ ID NO: 804127 - RNA, 20 nt, Artificial Sequence
  Synthetic
cacugcaguugcagcugcag

SEQ ID NO: 804128 - RNA, 20 nt, Artificial Sequence
  Synthetic
cuuaaagggaggggcugcag

SEQ ID NO: 804129 - RNA, 20 nt, Artificial Sequence
  Synthetic
caggauggcaugggcugcag

SEQ ID NO: 804130 - RNA, 20 nt, Artificial Sequence
  Synthetic
caggcagaaguuugcugcag

SEQ ID NO: 804131 - RNA, 20 nt, Artificial Sequence
  Synthetic
cuggcuugcccucucugcag

SEQ ID NO: 804132 - RNA, 20 nt, Artificial Sequence
  Synthetic
agacucucccuucucugcag

SEQ ID NO: 804133 - RNA, 20 nt, Artificial Sequence
  Synthetic
ucuucacccagugucugcag

SEQ ID NO: 804134 - RNA, 20 nt, Artificial Sequence
  Synthetic
agcucagauggcuucugcag

SEQ ID NO: 804135 - RNA, 20 nt, Artificial Sequence
  Synthetic
uauugccucaauuucugcag

SEQ ID NO: 804136 - RNA, 20 nt, Artificial Sequence
  Synthetic
auuuucccucauuucugcag

SEQ ID NO: 804137 - RNA, 20 nt, Artificial Sequence
  Synthetic
ucugucuuccuuuucugcag

SEQ ID NO: 804138 - RNA, 20 nt, Artificial Sequence
  Synthetic
ucacccaggcuaaagugcag

SEQ ID NO: 804139 - RNA, 20 nt, Artificial Sequence
  Synthetic
uuuauucaauacaagugcag

SEQ ID NO: 804140 - RNA, 20 nt, Artificial Sequence
  Synthetic
agcuggauagggaagugcag

SEQ ID NO: 804141 - RNA, 20 nt, Artificial Sequence
  Synthetic
ucacccaggcugaagugcag

SEQ ID NO: 804142 - RNA, 20 nt, Artificial Sequence
  Synthetic
ucauccaggcugaagugcag

SEQ ID NO: 804143 - RNA, 20 nt, Artificial Sequence
  Synthetic
cuaacaaacgcacagugcag

SEQ ID NO: 804144 - RNA, 20 nt, Artificial Sequence
  Synthetic
ccacuccguaggcagugcag

SEQ ID NO: 804145 - RNA, 20 nt, Artificial Sequence
  Synthetic
ucacccaagcugcagugcag

SEQ ID NO: 804146 - RNA, 20 nt, Artificial Sequence
  Synthetic
ucauccaggcugcagugcag

SEQ ID NO: 804147 - RNA, 20 nt, Artificial Sequence
  Synthetic
acaaaaugauuucagugcag

SEQ ID NO: 804148 - RNA, 20 nt, Artificial Sequence
  Synthetic
ccacccaggcuagagugcag

SEQ ID NO: 804149 - RNA, 20 nt, Artificial Sequence
  Synthetic
ucacccaggcuagagugcag

SEQ ID NO: 804150 - RNA, 20 nt, Artificial Sequence
  Synthetic
uuacccaggcuagagugcag

SEQ ID NO: 804151 - RNA, 20 nt, Artificial Sequence
  Synthetic
ucgcccaggcaggagugcag

SEQ ID NO: 804152 - RNA, 20 nt, Artificial Sequence
  Synthetic
uuccccaugccggagugcag

SEQ ID NO: 804153 - RNA, 20 nt, Artificial Sequence
  Synthetic
ucacccaggucggagugcag

SEQ ID NO: 804154 - RNA, 20 nt, Artificial Sequence
  Synthetic
cugcccaagcuggagugcag

SEQ ID NO: 804155 - RNA, 20 nt, Artificial Sequence
  Synthetic
ucaaccaggcuggagugcag

SEQ ID NO: 804156 - RNA, 20 nt, Artificial Sequence
  Synthetic
uucaccaggcuggagugcag

SEQ ID NO: 804157 - RNA, 20 nt, Artificial Sequence
  Synthetic
ucacccaggcuggagugcag

SEQ ID NO: 804158 - RNA, 20 nt, Artificial Sequence
  Synthetic
cagcccaggcuggagugcag

SEQ ID NO: 804159 - RNA, 20 nt, Artificial Sequence
  Synthetic
ucgcccaggcuggagugcag

SEQ ID NO: 804160 - RNA, 20 nt, Artificial Sequence
  Synthetic
uugcccaggcuggagugcag

SEQ ID NO: 804161 - RNA, 20 nt, Artificial Sequence
  Synthetic
ucacucaggcuggagugcag

SEQ ID NO: 804162 - RNA, 20 nt, Artificial Sequence
  Synthetic
ucgcucaggcuggagugcag

SEQ ID NO: 804163 - RNA, 20 nt, Artificial Sequence
  Synthetic
uugccuaggcuggagugcag

SEQ ID NO: 804164 - RNA, 20 nt, Artificial Sequence
  Synthetic
uugcccgggcuggagugcag

SEQ ID NO: 804165 - RNA, 20 nt, Artificial Sequence
  Synthetic
ucaugugggcuggagugcag

SEQ ID NO: 804166 - RNA, 20 nt, Artificial Sequence
  Synthetic
ucacccagucuggagugcag

SEQ ID NO: 804167 - RNA, 20 nt, Artificial Sequence
  Synthetic
uugcccgggguggagugcag

SEQ ID NO: 804168 - RNA, 20 nt, Artificial Sequence
  Synthetic
ucgcccagguuggagugcag

SEQ ID NO: 804169 - RNA, 20 nt, Artificial Sequence
  Synthetic
ccaggcuggagugagugcag

SEQ ID NO: 804170 - RNA, 20 nt, Artificial Sequence
  Synthetic
auguuuaucugugagugcag

SEQ ID NO: 804171 - RNA, 20 nt, Artificial Sequence
  Synthetic
cugcccaggcuugagugcag

SEQ ID NO: 804172 - RNA, 20 nt, Artificial Sequence
  Synthetic
ucaugcaaguuugagugcag

SEQ ID NO: 804173 - RNA, 20 nt, Artificial Sequence
  Synthetic
uucuauuuuaaauagugcag

SEQ ID NO: 804174 - RNA, 20 nt, Artificial Sequence
  Synthetic
ucgcccaggcuguagugcag

SEQ ID NO: 804175 - RNA, 20 nt, Artificial Sequence
  Synthetic
uugcccaggcuguagugcag

SEQ ID NO: 804176 - RNA, 20 nt, Artificial Sequence
  Synthetic
augggggaaauuuagugcag

SEQ ID NO: 804177 - RNA, 20 nt, Artificial Sequence
  Synthetic
acaggccaggccaggugcag

SEQ ID NO: 804178 - RNA, 20 nt, Artificial Sequence
  Synthetic
uacaaauuggccaggugcag

SEQ ID NO: 804179 - RNA, 20 nt, Artificial Sequence
  Synthetic
aaaauguaguccaggugcag

SEQ ID NO: 804180 - RNA, 20 nt, Artificial Sequence
  Synthetic
aaaaauaaggucaggugcag

SEQ ID NO: 804181 - RNA, 20 nt, Artificial Sequence
  Synthetic
acucauugagcuaggugcag

SEQ ID NO: 804182 - RNA, 20 nt, Artificial Sequence
  Synthetic
aaaacaggagccgggugcag

SEQ ID NO: 804183 - RNA, 20 nt, Artificial Sequence
  Synthetic
uugugugaggccgggugcag

SEQ ID NO: 804184 - RNA, 20 nt, Artificial Sequence
  Synthetic
ucacccaggcuggggugcag

SEQ ID NO: 804185 - RNA, 20 nt, Artificial Sequence
  Synthetic
ucacaucuggcugggugcag

SEQ ID NO: 804186 - RNA, 20 nt, Artificial Sequence
  Synthetic
aauuuccaggccuggugcag

SEQ ID NO: 804187 - RNA, 20 nt, Artificial Sequence
  Synthetic
aaguaaaggagguggugcag

SEQ ID NO: 804188 - RNA, 20 nt, Artificial Sequence
  Synthetic
uccucuauuugaaugugcag

SEQ ID NO: 804189 - RNA, 20 nt, Artificial Sequence
  Synthetic
auucuuagaaauaugugcag

SEQ ID NO: 804190 - RNA, 20 nt, Artificial Sequence
  Synthetic
uuuauguuccuugugugcag

SEQ ID NO: 804191 - RNA, 20 nt, Artificial Sequence
  Synthetic
auccauucuaauuugugcag

SEQ ID NO: 804192 - RNA, 20 nt, Artificial Sequence
  Synthetic
aaaaugaggggauauugcag

SEQ ID NO: 804193 - RNA, 20 nt, Artificial Sequence
  Synthetic
augagaaaacaaacuugcag

SEQ ID NO: 804194 - RNA, 20 nt, Artificial Sequence
  Synthetic
acaaagaaaugaacuugcag

SEQ ID NO: 804195 - RNA, 20 nt, Artificial Sequence
  Synthetic
agaguuguauuuucuugcag

SEQ ID NO: 804196 - RNA, 20 nt, Artificial Sequence
  Synthetic
uaggggccaaaaaguugcag

SEQ ID NO: 804197 - RNA, 20 nt, Artificial Sequence
  Synthetic
uggaaucuuucugguugcag

SEQ ID NO: 804198 - RNA, 20 nt, Artificial Sequence
  Synthetic
uauuucuuggcauguugcag

SEQ ID NO: 804199 - RNA, 20 nt, Artificial Sequence
  Synthetic
auaaaaauugacauuugcag

SEQ ID NO: 804200 - RNA, 20 nt, Artificial Sequence
  Synthetic
uuuuuuuuuuugauuugcag

SEQ ID NO: 804201 - RNA, 20 nt, Artificial Sequence
  Synthetic
auuuuggcaugauuuugcag

SEQ ID NO: 804202 - RNA, 20 nt, Artificial Sequence
  Synthetic
augucuuuuauauuuugcag

SEQ ID NO: 804203 - RNA, 20 nt, Artificial Sequence
  Synthetic
aagacuggaacaaaaaucag

SEQ ID NO: 804204 - RNA, 20 nt, Artificial Sequence
  Synthetic
aucuguaagugaaaaaucag

SEQ ID NO: 804205 - RNA, 20 nt, Artificial Sequence
  Synthetic
auguuuguuuacaaaaucag

SEQ ID NO: 804206 - RNA, 20 nt, Artificial Sequence
  Synthetic
ucuuuccaaauuaaaaucag

SEQ ID NO: 804207 - RNA, 20 nt, Artificial Sequence
  Synthetic
aaaaacaugagacaaaucag

SEQ ID NO: 804208 - RNA, 20 nt, Artificial Sequence
  Synthetic
aaaggcuaacauuaaaucag

SEQ ID NO: 804209 - RNA, 20 nt, Artificial Sequence
  Synthetic
cuguuugcuguuacaaucag

SEQ ID NO: 804210 - RNA, 20 nt, Artificial Sequence
  Synthetic
acauuacguuaagcaaucag

SEQ ID NO: 804211 - RNA, 20 nt, Artificial Sequence
  Synthetic
ucgugguuaggaagaaucag

SEQ ID NO: 804212 - RNA, 20 nt, Artificial Sequence
  Synthetic
uugaaagaauucagaaucag

SEQ ID NO: 804213 - RNA, 20 nt, Artificial Sequence
  Synthetic
aaaagugauuagagaaucag

SEQ ID NO: 804214 - RNA, 20 nt, Artificial Sequence
  Synthetic
acaccuauuuuuagaaucag

SEQ ID NO: 804215 - RNA, 20 nt, Artificial Sequence
  Synthetic
uggaccaggcagggaaucag

SEQ ID NO: 804216 - RNA, 20 nt, Artificial Sequence
  Synthetic
aaccugacuuugggaaucag

SEQ ID NO: 804217 - RNA, 20 nt, Artificial Sequence
  Synthetic
agauugaguaaaugaaucag

SEQ ID NO: 804218 - RNA, 20 nt, Artificial Sequence
  Synthetic
caugagggguucugaaucag

SEQ ID NO: 804219 - RNA, 20 nt, Artificial Sequence
  Synthetic
acguaaggaaggauaaucag

SEQ ID NO: 804220 - RNA, 20 nt, Artificial Sequence
  Synthetic
ugguuuuccugacuaaucag

SEQ ID NO: 804221 - RNA, 20 nt, Artificial Sequence
  Synthetic
uuauuaagaggaaacaucag

SEQ ID NO: 804222 - RNA, 20 nt, Artificial Sequence
  Synthetic
agcuucuauuacaacaucag

SEQ ID NO: 804223 - RNA, 20 nt, Artificial Sequence
  Synthetic
acguuacuaguccacaucag

SEQ ID NO: 804224 - RNA, 20 nt, Artificial Sequence
  Synthetic
uaugcuguauuugacaucag

SEQ ID NO: 804225 - RNA, 20 nt, Artificial Sequence
  Synthetic
cauguacguuucuacaucag

SEQ ID NO: 804226 - RNA, 20 nt, Artificial Sequence
  Synthetic
cuuugaaauaacaccaucag

SEQ ID NO: 804227 - RNA, 20 nt, Artificial Sequence
  Synthetic
ucagccuaggugcccaucag

SEQ ID NO: 804228 - RNA, 20 nt, Artificial Sequence
  Synthetic
aguuuacccagauccaucag

SEQ ID NO: 804229 - RNA, 20 nt, Artificial Sequence
  Synthetic
acuuuauccagauccaucag

SEQ ID NO: 804230 - RNA, 20 nt, Artificial Sequence
  Synthetic
ucaaccuaaacguccaucag

SEQ ID NO: 804231 - RNA, 20 nt, Artificial Sequence
  Synthetic
ucaaccuaaguuuccaucag

SEQ ID NO: 804232 - RNA, 20 nt, Artificial Sequence
  Synthetic
agacauaggguuuccaucag

SEQ ID NO: 804233 - RNA, 20 nt, Artificial Sequence
  Synthetic
auaaugccagucagcaucag

SEQ ID NO: 804234 - RNA, 20 nt, Artificial Sequence
  Synthetic
aggccaugggaaaucaucag

SEQ ID NO: 804235 - RNA, 20 nt, Artificial Sequence
  Synthetic
uggauuucauaacucaucag

SEQ ID NO: 804236 - RNA, 20 nt, Artificial Sequence
  Synthetic
aacuguuaaaaagucaucag

SEQ ID NO: 804237 - RNA, 20 nt, Artificial Sequence
  Synthetic
ugaaccaugcaguucaucag

SEQ ID NO: 804238 - RNA, 20 nt, Artificial Sequence
  Synthetic
cuuuucaauauuuucaucag

SEQ ID NO: 804239 - RNA, 20 nt, Artificial Sequence
  Synthetic
ugucgguagcuggagaucag

SEQ ID NO: 804240 - RNA, 20 nt, Artificial Sequence
  Synthetic
aaaacagagauauagaucag

SEQ ID NO: 804241 - RNA, 20 nt, Artificial Sequence
  Synthetic
auaugaaauagcuagaucag

SEQ ID NO: 804242 - RNA, 20 nt, Artificial Sequence
  Synthetic
ucauagaagaaguagaucag

SEQ ID NO: 804243 - RNA, 20 nt, Artificial Sequence
  Synthetic
uaauucagaauuuagaucag

SEQ ID NO: 804244 - RNA, 20 nt, Artificial Sequence
  Synthetic
cauauugauagaaggaucag

SEQ ID NO: 804245 - RNA, 20 nt, Artificial Sequence
  Synthetic
ugcuuuuuccagaggaucag

SEQ ID NO: 804246 - RNA, 20 nt, Artificial Sequence
  Synthetic
acaauuuuuccauggaucag

SEQ ID NO: 804247 - RNA, 20 nt, Artificial Sequence
  Synthetic
uccuccaaaugguggaucag

SEQ ID NO: 804248 - RNA, 20 nt, Artificial Sequence
  Synthetic
augagggaauggcugaucag

SEQ ID NO: 804249 - RNA, 20 nt, Artificial Sequence
  Synthetic
auuugcaauaaugugaucag

SEQ ID NO: 804250 - RNA, 20 nt, Artificial Sequence
  Synthetic
auuggauaugaaaauaucag

SEQ ID NO: 804251 - RNA, 20 nt, Artificial Sequence
  Synthetic
cuguguguagcaaauaucag

SEQ ID NO: 804252 - RNA, 20 nt, Artificial Sequence
  Synthetic
aauuaaauucacaauaucag

SEQ ID NO: 804253 - RNA, 20 nt, Artificial Sequence
  Synthetic
ugaagaaaggaauauaucag

SEQ ID NO: 804254 - RNA, 20 nt, Artificial Sequence
  Synthetic
aaaaaaacagaguauaucag

SEQ ID NO: 804255 - RNA, 20 nt, Artificial Sequence
  Synthetic
cacacaauggggccuaucag

SEQ ID NO: 804256 - RNA, 20 nt, Artificial Sequence
  Synthetic
cuaacccacauuucuaucag

SEQ ID NO: 804257 - RNA, 20 nt, Artificial Sequence
  Synthetic
uuauuuaaauagcguaucag

SEQ ID NO: 804258 - RNA, 20 nt, Artificial Sequence
  Synthetic
ucuccacuuaaauguaucag

SEQ ID NO: 804259 - RNA, 20 nt, Artificial Sequence
  Synthetic
cagauugauuaacuuaucag

SEQ ID NO: 804260 - RNA, 20 nt, Artificial Sequence
  Synthetic
aggugaauuagaguuaucag

SEQ ID NO: 804261 - RNA, 20 nt, Artificial Sequence
  Synthetic
acacacagcuggguuaucag

SEQ ID NO: 804262 - RNA, 20 nt, Artificial Sequence
  Synthetic
uuucuaaguauuguuaucag

SEQ ID NO: 804263 - RNA, 20 nt, Artificial Sequence
  Synthetic
uuugcuucuauauuuaucag

SEQ ID NO: 804264 - RNA, 20 nt, Artificial Sequence
  Synthetic
acaccaggaaacuuuaucag

SEQ ID NO: 804265 - RNA, 20 nt, Artificial Sequence
  Synthetic
uugaggugucacuuuaucag

SEQ ID NO: 804266 - RNA, 20 nt, Artificial Sequence
  Synthetic
agaucuguugguuuuaucag

SEQ ID NO: 804267 - RNA, 20 nt, Artificial Sequence
  Synthetic
agggucaucaguaaacucag

SEQ ID NO: 804268 - RNA, 20 nt, Artificial Sequence
  Synthetic
ucauugaaugaagaacucag

SEQ ID NO: 804269 - RNA, 20 nt, Artificial Sequence
  Synthetic
aauuguaaauaagaacucag

SEQ ID NO: 804270 - RNA, 20 nt, Artificial Sequence
  Synthetic
uucugucucuuagaacucag

SEQ ID NO: 804271 - RNA, 20 nt, Artificial Sequence
  Synthetic
auacuuucucuugaacucag

SEQ ID NO: 804272 - RNA, 20 nt, Artificial Sequence
  Synthetic
uuauuacacaguuaacucag

SEQ ID NO: 804273 - RNA, 20 nt, Artificial Sequence
  Synthetic
uguguuuggcuaucacucag

SEQ ID NO: 804274 - RNA, 20 nt, Artificial Sequence
  Synthetic
agauuggaaacgagacucag

SEQ ID NO: 804275 - RNA, 20 nt, Artificial Sequence
  Synthetic
uauuuuuaauguagacucag

SEQ ID NO: 804276 - RNA, 20 nt, Artificial Sequence
  Synthetic
agaguaaaauugggacucag

SEQ ID NO: 804277 - RNA, 20 nt, Artificial Sequence
  Synthetic
agagaaaucaagugacucag

SEQ ID NO: 804278 - RNA, 20 nt, Artificial Sequence
  Synthetic
uaauuauuaaacauacucag

SEQ ID NO: 804279 - RNA, 20 nt, Artificial Sequence
  Synthetic
ccucccaauuccauacucag

SEQ ID NO: 804280 - RNA, 20 nt, Artificial Sequence
  Synthetic
cuguaguaccagcuacucag

SEQ ID NO: 804281 - RNA, 20 nt, Artificial Sequence
  Synthetic
cuaguacauauuguacucag

SEQ ID NO: 804282 - RNA, 20 nt, Artificial Sequence
  Synthetic
uuucaauguuacuuacucag

SEQ ID NO: 804283 - RNA, 20 nt, Artificial Sequence
  Synthetic
aaugaccccagaaaccucag

SEQ ID NO: 804284 - RNA, 20 nt, Artificial Sequence
  Synthetic
ccagaggauuauaaccucag

SEQ ID NO: 804285 - RNA, 20 nt, Artificial Sequence
  Synthetic
aaaaaaagcccacaccucag

SEQ ID NO: 804286 - RNA, 20 nt, Artificial Sequence
  Synthetic
cauaugcucaguuaccucag

SEQ ID NO: 804287 - RNA, 20 nt, Artificial Sequence
  Synthetic
ucagcaauuuaagcccucag

SEQ ID NO: 804288 - RNA, 20 nt, Artificial Sequence
  Synthetic
ucuguauuugggagccucag

SEQ ID NO: 804289 - RNA, 20 nt, Artificial Sequence
  Synthetic
agauaguuuuggggccucag

SEQ ID NO: 804290 - RNA, 20 nt, Artificial Sequence
  Synthetic
aguucugcaaggugccucag

SEQ ID NO: 804291 - RNA, 20 nt, Artificial Sequence
  Synthetic
cuuaggcguuaacagcucag

SEQ ID NO: 804292 - RNA, 20 nt, Artificial Sequence
  Synthetic
agccccuggacacagcucag

SEQ ID NO: 804293 - RNA, 20 nt, Artificial Sequence
  Synthetic
auuugguugucacagcucag

SEQ ID NO: 804294 - RNA, 20 nt, Artificial Sequence
  Synthetic
cguucugcucuccagcucag

SEQ ID NO: 804295 - RNA, 20 nt, Artificial Sequence
  Synthetic
auuucguguguccagcucag

SEQ ID NO: 804296 - RNA, 20 nt, Artificial Sequence
  Synthetic
agccaaguggucuagcucag

SEQ ID NO: 804297 - RNA, 20 nt, Artificial Sequence
  Synthetic
cuugacagaacaaggcucag

SEQ ID NO: 804298 - RNA, 20 nt, Artificial Sequence
  Synthetic
agggaagagagcuugcucag

SEQ ID NO: 804299 - RNA, 20 nt, Artificial Sequence
  Synthetic
acucaauaaauuuugcucag

SEQ ID NO: 804300 - RNA, 20 nt, Artificial Sequence
  Synthetic
aacgauucccuuuugcucag

SEQ ID NO: 804301 - RNA, 20 nt, Artificial Sequence
  Synthetic
ugacaggugagaaaucucag

SEQ ID NO: 804302 - RNA, 20 nt, Artificial Sequence
  Synthetic
uuuaaggaccacaaucucag

SEQ ID NO: 804303 - RNA, 20 nt, Artificial Sequence
  Synthetic
ugggcagaacagaaucucag

SEQ ID NO: 804304 - RNA, 20 nt, Artificial Sequence
  Synthetic
augaagccagcacaucucag

SEQ ID NO: 804305 - RNA, 20 nt, Artificial Sequence
  Synthetic
uuuuauugcauauaucucag

SEQ ID NO: 804306 - RNA, 20 nt, Artificial Sequence
  Synthetic
cuguuuuugcuguaucucag

SEQ ID NO: 804307 - RNA, 20 nt, Artificial Sequence
  Synthetic
augcuggcuuugacucucag

SEQ ID NO: 804308 - RNA, 20 nt, Artificial Sequence
  Synthetic
cacacaccggggccucucag

SEQ ID NO: 804309 - RNA, 20 nt, Artificial Sequence
  Synthetic
aaauauguccuuccucucag

SEQ ID NO: 804310 - RNA, 20 nt, Artificial Sequence
  Synthetic
ccgaugaaaguggcucucag

SEQ ID NO: 804311 - RNA, 20 nt, Artificial Sequence
  Synthetic
auauuacaaugaucucucag

SEQ ID NO: 804312 - RNA, 20 nt, Artificial Sequence
  Synthetic
acuuccugcauaucucucag

SEQ ID NO: 804313 - RNA, 20 nt, Artificial Sequence
  Synthetic
auuugguauguuucucucag

SEQ ID NO: 804314 - RNA, 20 nt, Artificial Sequence
  Synthetic
auccuucucucuagucucag

SEQ ID NO: 804315 - RNA, 20 nt, Artificial Sequence
  Synthetic
uugguugcguugggucucag

SEQ ID NO: 804316 - RNA, 20 nt, Artificial Sequence
  Synthetic
ugccacaaaaguggucucag

SEQ ID NO: 804317 - RNA, 20 nt, Artificial Sequence
  Synthetic
ccagacugagguggucucag

SEQ ID NO: 804318 - RNA, 20 nt, Artificial Sequence
  Synthetic
cugaaccuucagugucucag

SEQ ID NO: 804319 - RNA, 20 nt, Artificial Sequence
  Synthetic
auuuaagacaacauucucag

SEQ ID NO: 804320 - RNA, 20 nt, Artificial Sequence
  Synthetic
uuguaauccaagcuucucag

SEQ ID NO: 804321 - RNA, 20 nt, Artificial Sequence
  Synthetic
cuuauggcuuuucuucucag

SEQ ID NO: 804322 - RNA, 20 nt, Artificial Sequence
  Synthetic
caucucuaacaaguucucag

SEQ ID NO: 804323 - RNA, 20 nt, Artificial Sequence
  Synthetic
ugggacuuaaaauuucucag

SEQ ID NO: 804324 - RNA, 20 nt, Artificial Sequence
  Synthetic
uuuuauguagaauuucucag

SEQ ID NO: 804325 - RNA, 20 nt, Artificial Sequence
  Synthetic
aaaaccucucuuuuucucag

SEQ ID NO: 804326 - RNA, 20 nt, Artificial Sequence
  Synthetic
aauucuguaaagaaagucag

SEQ ID NO: 804327 - RNA, 20 nt, Artificial Sequence
  Synthetic
uggagaaauacucaagucag

SEQ ID NO: 804328 - RNA, 20 nt, Artificial Sequence
  Synthetic
cauuauaagaaggaagucag

SEQ ID NO: 804329 - RNA, 20 nt, Artificial Sequence
  Synthetic
aaggcagcagccccagucag

SEQ ID NO: 804330 - RNA, 20 nt, Artificial Sequence
  Synthetic
auaccaaugcugccagucag

SEQ ID NO: 804331 - RNA, 20 nt, Artificial Sequence
  Synthetic
aucuauucaccaucagucag

SEQ ID NO: 804332 - RNA, 20 nt, Artificial Sequence
  Synthetic
uuggauugaggaggagucag

SEQ ID NO: 804333 - RNA, 20 nt, Artificial Sequence
  Synthetic
cccuugaaccagggagucag

SEQ ID NO: 804334 - RNA, 20 nt, Artificial Sequence
  Synthetic
aaucuuaagaauggagucag

SEQ ID NO: 804335 - RNA, 20 nt, Artificial Sequence
  Synthetic
cagaagcaucugauagucag

SEQ ID NO: 804336 - RNA, 20 nt, Artificial Sequence
  Synthetic
uuccugagcauuauagucag

SEQ ID NO: 804337 - RNA, 20 nt, Artificial Sequence
  Synthetic
agaccuuguccuguagucag

SEQ ID NO: 804338 - RNA, 20 nt, Artificial Sequence
  Synthetic
agcauaaauuacaaggucag

SEQ ID NO: 804339 - RNA, 20 nt, Artificial Sequence
  Synthetic
acaaaaacagccaaggucag

SEQ ID NO: 804340 - RNA, 20 nt, Artificial Sequence
  Synthetic
ucaaugucagucaaggucag

SEQ ID NO: 804341 - RNA, 20 nt, Artificial Sequence
  Synthetic
cugaagaacaggcaggucag

SEQ ID NO: 804342 - RNA, 20 nt, Artificial Sequence
  Synthetic
cagaugcauauucaggucag

SEQ ID NO: 804343 - RNA, 20 nt, Artificial Sequence
  Synthetic
aguugguucaaggaggucag

SEQ ID NO: 804344 - RNA, 20 nt, Artificial Sequence
  Synthetic
uccagagagcagagggucag

SEQ ID NO: 804345 - RNA, 20 nt, Artificial Sequence
  Synthetic
cuucagggagacggggucag

SEQ ID NO: 804346 - RNA, 20 nt, Artificial Sequence
  Synthetic
agagaaucacuaugggucag

SEQ ID NO: 804347 - RNA, 20 nt, Artificial Sequence
  Synthetic
cugcaaaagggcugggucag

SEQ ID NO: 804348 - RNA, 20 nt, Artificial Sequence
  Synthetic
agacuagaggagugggucag

SEQ ID NO: 804349 - RNA, 20 nt, Artificial Sequence
  Synthetic
aaaagggcuguguuggucag

SEQ ID NO: 804350 - RNA, 20 nt, Artificial Sequence
  Synthetic
uuauccaaucugaaugucag

SEQ ID NO: 804351 - RNA, 20 nt, Artificial Sequence
  Synthetic
aucccgcaagaacaugucag

SEQ ID NO: 804352 - RNA, 20 nt, Artificial Sequence
  Synthetic
ucacaggucagccaugucag

SEQ ID NO: 804353 - RNA, 20 nt, Artificial Sequence
  Synthetic
augucuccagggcaugucag

SEQ ID NO: 804354 - RNA, 20 nt, Artificial Sequence
  Synthetic
aagauagauauucaugucag

SEQ ID NO: 804355 - RNA, 20 nt, Artificial Sequence
  Synthetic
uguuggugcuuucaugucag

SEQ ID NO: 804356 - RNA, 20 nt, Artificial Sequence
  Synthetic
uugcaacagagcgaugucag

SEQ ID NO: 804357 - RNA, 20 nt, Artificial Sequence
  Synthetic
aaagaggggaaauaugucag

SEQ ID NO: 804358 - RNA, 20 nt, Artificial Sequence
  Synthetic
caguccuaccccacugucag

SEQ ID NO: 804359 - RNA, 20 nt, Artificial Sequence
  Synthetic
cacacacuggggccugucag

SEQ ID NO: 804360 - RNA, 20 nt, Artificial Sequence
  Synthetic
uuauaguagaguccugucag

SEQ ID NO: 804361 - RNA, 20 nt, Artificial Sequence
  Synthetic
uuuggaucuucaucugucag

SEQ ID NO: 804362 - RNA, 20 nt, Artificial Sequence
  Synthetic
uuaauguauggcagugucag

SEQ ID NO: 804363 - RNA, 20 nt, Artificial Sequence
  Synthetic
auugaacuaccaugugucag

SEQ ID NO: 804364 - RNA, 20 nt, Artificial Sequence
  Synthetic
agaaaaauguuuugugucag

SEQ ID NO: 804365 - RNA, 20 nt, Artificial Sequence
  Synthetic
uacagcuauugaaaauucag

SEQ ID NO: 804366 - RNA, 20 nt, Artificial Sequence
  Synthetic
aagaaacaaaggaaauucag

SEQ ID NO: 804367 - RNA, 20 nt, Artificial Sequence
  Synthetic
uuucaaaguguacaauucag

SEQ ID NO: 804368 - RNA, 20 nt, Artificial Sequence
  Synthetic
aaccucugccuagaauucag

SEQ ID NO: 804369 - RNA, 20 nt, Artificial Sequence
  Synthetic
aucagggugguagaauucag

SEQ ID NO: 804370 - RNA, 20 nt, Artificial Sequence
  Synthetic
cugugguucuaugaauucag

SEQ ID NO: 804371 - RNA, 20 nt, Artificial Sequence
  Synthetic
aaugaaucugaauaauucag

SEQ ID NO: 804372 - RNA, 20 nt, Artificial Sequence
  Synthetic
aaaguaugaacauaauucag

SEQ ID NO: 804373 - RNA, 20 nt, Artificial Sequence
  Synthetic
accaaaaaaauuuaauucag

SEQ ID NO: 804374 - RNA, 20 nt, Artificial Sequence
  Synthetic
ugcaacauguuaccauucag

SEQ ID NO: 804375 - RNA, 20 nt, Artificial Sequence
  Synthetic
ucaccauaauguagauucag

SEQ ID NO: 804376 - RNA, 20 nt, Artificial Sequence
  Synthetic
ugcuaaggauuaugauucag

SEQ ID NO: 804377 - RNA, 20 nt, Artificial Sequence
  Synthetic
aaaugcagauugugauucag

SEQ ID NO: 804378 - RNA, 20 nt, Artificial Sequence
  Synthetic
acuuagugcuuuugauucag

SEQ ID NO: 804379 - RNA, 20 nt, Artificial Sequence
  Synthetic
uccaacauaaaaauauucag

SEQ ID NO: 804380 - RNA, 20 nt, Artificial Sequence
  Synthetic
uuaaacauuuuaauauucag

SEQ ID NO: 804381 - RNA, 20 nt, Artificial Sequence
  Synthetic
uacaacucaccuauauucag

SEQ ID NO: 804382 - RNA, 20 nt, Artificial Sequence
  Synthetic
agggacaugugacuauucag

SEQ ID NO: 804383 - RNA, 20 nt, Artificial Sequence
  Synthetic
auucucuugucccuauucag

SEQ ID NO: 804384 - RNA, 20 nt, Artificial Sequence
  Synthetic
auuucacauuaucuauucag

SEQ ID NO: 804385 - RNA, 20 nt, Artificial Sequence
  Synthetic
ucuagguauuacguauucag

SEQ ID NO: 804386 - RNA, 20 nt, Artificial Sequence
  Synthetic
uccaaacacugauuauucag

SEQ ID NO: 804387 - RNA, 20 nt, Artificial Sequence
  Synthetic
caaccaauuacuuuauucag

SEQ ID NO: 804388 - RNA, 20 nt, Artificial Sequence
  Synthetic
aucucaagguaaaacuucag

SEQ ID NO: 804389 - RNA, 20 nt, Artificial Sequence
  Synthetic
ugucaacauugaaacuucag

SEQ ID NO: 804390 - RNA, 20 nt, Artificial Sequence
  Synthetic
agcccagcagugaacuucag

SEQ ID NO: 804391 - RNA, 20 nt, Artificial Sequence
  Synthetic
uaaaaaauuauucacuucag

SEQ ID NO: 804392 - RNA, 20 nt, Artificial Sequence
  Synthetic
acuacucugacagacuucag

SEQ ID NO: 804393 - RNA, 20 nt, Artificial Sequence
  Synthetic
agaauccggcuggacuucag

SEQ ID NO: 804394 - RNA, 20 nt, Artificial Sequence
  Synthetic
aauuuccaaaaugacuucag

SEQ ID NO: 804395 - RNA, 20 nt, Artificial Sequence
  Synthetic
uuuucccacauguacuucag

SEQ ID NO: 804396 - RNA, 20 nt, Artificial Sequence
  Synthetic
aauaaacuauauuacuucag

SEQ ID NO: 804397 - RNA, 20 nt, Artificial Sequence
  Synthetic
uucuuccccagagccuucag

SEQ ID NO: 804398 - RNA, 20 nt, Artificial Sequence
  Synthetic
agaaaaucaaaugccuucag

SEQ ID NO: 804399 - RNA, 20 nt, Artificial Sequence
  Synthetic
cagacugaggauuccuucag

SEQ ID NO: 804400 - RNA, 20 nt, Artificial Sequence
  Synthetic
cacacccucuggggcuucag

SEQ ID NO: 804401 - RNA, 20 nt, Artificial Sequence
  Synthetic
acaguuccgcauggcuucag

SEQ ID NO: 804402 - RNA, 20 nt, Artificial Sequence
  Synthetic
agucucaugaccugcuucag

SEQ ID NO: 804403 - RNA, 20 nt, Artificial Sequence
  Synthetic
aguucggaccauugcuucag

SEQ ID NO: 804404 - RNA, 20 nt, Artificial Sequence
  Synthetic
ucuugaaaucauugcuucag

SEQ ID NO: 804405 - RNA, 20 nt, Artificial Sequence
  Synthetic
agcucaggcuguugcuucag

SEQ ID NO: 804406 - RNA, 20 nt, Artificial Sequence
  Synthetic
uaaucagcaguagucuucag

SEQ ID NO: 804407 - RNA, 20 nt, Artificial Sequence
  Synthetic
cuucaucuaaaugucuucag

SEQ ID NO: 804408 - RNA, 20 nt, Artificial Sequence
  Synthetic
aaaauucuaacuuucuucag

SEQ ID NO: 804409 - RNA, 20 nt, Artificial Sequence
  Synthetic
ucacauaacuggaaguucag

SEQ ID NO: 804410 - RNA, 20 nt, Artificial Sequence
  Synthetic
uuuuucacuuuuaaguucag

SEQ ID NO: 804411 - RNA, 20 nt, Artificial Sequence
  Synthetic
uuuuuaaguauacaguucag

SEQ ID NO: 804412 - RNA, 20 nt, Artificial Sequence
  Synthetic
uguaaguguauacaguucag

SEQ ID NO: 804413 - RNA, 20 nt, Artificial Sequence
  Synthetic
acuggcgaugcccaguucag

SEQ ID NO: 804414 - RNA, 20 nt, Artificial Sequence
  Synthetic
ugcauuuugccugaguucag

SEQ ID NO: 804415 - RNA, 20 nt, Artificial Sequence
  Synthetic
ugauggucucucuaguucag

SEQ ID NO: 804416 - RNA, 20 nt, Artificial Sequence
  Synthetic
aacuuuuaaauuagguucag

SEQ ID NO: 804417 - RNA, 20 nt, Artificial Sequence
  Synthetic
uggaguauuuuaggguucag

SEQ ID NO: 804418 - RNA, 20 nt, Artificial Sequence
  Synthetic
uauagaagaacaguguucag

SEQ ID NO: 804419 - RNA, 20 nt, Artificial Sequence
  Synthetic
ccuugaggcucuguguucag

SEQ ID NO: 804420 - RNA, 20 nt, Artificial Sequence
  Synthetic
cauuccuuccaaaauuucag

SEQ ID NO: 804421 - RNA, 20 nt, Artificial Sequence
  Synthetic
ugugcugagagcaauuucag

SEQ ID NO: 804422 - RNA, 20 nt, Artificial Sequence
  Synthetic
aacaucuuacagaauuucag

SEQ ID NO: 804423 - RNA, 20 nt, Artificial Sequence
  Synthetic
aaauaauuggauaauuucag

SEQ ID NO: 804424 - RNA, 20 nt, Artificial Sequence
  Synthetic
accuacaaaaguaauuucag

SEQ ID NO: 804425 - RNA, 20 nt, Artificial Sequence
  Synthetic
ucauauucagaacauuucag

SEQ ID NO: 804426 - RNA, 20 nt, Artificial Sequence
  Synthetic
auacuuacagcacauuucag

SEQ ID NO: 804427 - RNA, 20 nt, Artificial Sequence
  Synthetic
agccuuaucucucauuucag

SEQ ID NO: 804428 - RNA, 20 nt, Artificial Sequence
  Synthetic
aauagacuuguucauuucag

SEQ ID NO: 804429 - RNA, 20 nt, Artificial Sequence
  Synthetic
aacuucuaccuagauuucag

SEQ ID NO: 804430 - RNA, 20 nt, Artificial Sequence
  Synthetic
aaccucugccuagauuucag

SEQ ID NO: 804431 - RNA, 20 nt, Artificial Sequence
  Synthetic
cuucagaauauggauuucag

SEQ ID NO: 804432 - RNA, 20 nt, Artificial Sequence
  Synthetic
ugcuuugagaaauauuucag

SEQ ID NO: 804433 - RNA, 20 nt, Artificial Sequence
  Synthetic
uaaugaacuaaauauuucag

SEQ ID NO: 804434 - RNA, 20 nt, Artificial Sequence
  Synthetic
uauuguugcuaauauuucag

SEQ ID NO: 804435 - RNA, 20 nt, Artificial Sequence
  Synthetic
uguauguauacauauuucag

SEQ ID NO: 804436 - RNA, 20 nt, Artificial Sequence
  Synthetic
cuuugauuccucuauuucag

SEQ ID NO: 804437 - RNA, 20 nt, Artificial Sequence
  Synthetic
cuaaauugcuuuuauuucag

SEQ ID NO: 804438 - RNA, 20 nt, Artificial Sequence
  Synthetic
cccugcuuuaaaccuuucag

SEQ ID NO: 804439 - RNA, 20 nt, Artificial Sequence
  Synthetic
aaagaaaaauaagcuuucag

SEQ ID NO: 804440 - RNA, 20 nt, Artificial Sequence
  Synthetic
ccguauauuguggcuuucag

SEQ ID NO: 804441 - RNA, 20 nt, Artificial Sequence
  Synthetic
uguucucaacgaucuuucag

SEQ ID NO: 804442 - RNA, 20 nt, Artificial Sequence
  Synthetic
uggcucacguucucuuucag

SEQ ID NO: 804443 - RNA, 20 nt, Artificial Sequence
  Synthetic
ugacuagccaugucuuucag

SEQ ID NO: 804444 - RNA, 20 nt, Artificial Sequence
  Synthetic
aauguagcccucaguuucag

SEQ ID NO: 804445 - RNA, 20 nt, Artificial Sequence
  Synthetic
uugguguuagaggguuucag

SEQ ID NO: 804446 - RNA, 20 nt, Artificial Sequence
  Synthetic
aggucaccugaggguuucag

SEQ ID NO: 804447 - RNA, 20 nt, Artificial Sequence
  Synthetic
uaaauaaaacaugguuucag

SEQ ID NO: 804448 - RNA, 20 nt, Artificial Sequence
  Synthetic
uauauaauuuacuguuucag

SEQ ID NO: 804449 - RNA, 20 nt, Artificial Sequence
  Synthetic
cgguuucuggaguguuucag

SEQ ID NO: 804450 - RNA, 20 nt, Artificial Sequence
  Synthetic
agacacauauauuguuucag

SEQ ID NO: 804451 - RNA, 20 nt, Artificial Sequence
  Synthetic
agaaugucaagaauuuucag

SEQ ID NO: 804452 - RNA, 20 nt, Artificial Sequence
  Synthetic
uaacuuuucuuaauuuucag

SEQ ID NO: 804453 - RNA, 20 nt, Artificial Sequence
  Synthetic
ucugugauccucauuuucag

SEQ ID NO: 804454 - RNA, 20 nt, Artificial Sequence
  Synthetic
aauacugaagucauuuucag

SEQ ID NO: 804455 - RNA, 20 nt, Artificial Sequence
  Synthetic
auuuucaugaauauuuucag

SEQ ID NO: 804456 - RNA, 20 nt, Artificial Sequence
  Synthetic
ugaauucuaacaguuuucag

SEQ ID NO: 804457 - RNA, 20 nt, Artificial Sequence
  Synthetic
cauccaggcccuguuuucag

SEQ ID NO: 804458 - RNA, 20 nt, Artificial Sequence
  Synthetic
cugugucccuguguuuucag

SEQ ID NO: 804459 - RNA, 20 nt, Artificial Sequence
  Synthetic
uucuaaaaucacuuuuucag

SEQ ID NO: 804460 - RNA, 20 nt, Artificial Sequence
  Synthetic
uucuauuaugaguuuuucag

SEQ ID NO: 804461 - RNA, 20 nt, Artificial Sequence
  Synthetic
aacuuuugguuguuuuucag

SEQ ID NO: 804462 - RNA, 20 nt, Artificial Sequence
  Synthetic
aguauagaaaaaaaaaagag

SEQ ID NO: 804463 - RNA, 20 nt, Artificial Sequence
  Synthetic
aaaauuaaaauaaaaaagag

SEQ ID NO: 804464 - RNA, 20 nt, Artificial Sequence
  Synthetic
caacuggggcagaaaaagag

SEQ ID NO: 804465 - RNA, 20 nt, Artificial Sequence
  Synthetic
ccauccucugagaaaaagag

SEQ ID NO: 804466 - RNA, 20 nt, Artificial Sequence
  Synthetic
aggaaaacauuuaaaaagag

SEQ ID NO: 804467 - RNA, 20 nt, Artificial Sequence
  Synthetic
uuuuuauauuuuaaaaagag

SEQ ID NO: 804468 - RNA, 20 nt, Artificial Sequence
  Synthetic
ucuggcacucaccaaaagag

SEQ ID NO: 804469 - RNA, 20 nt, Artificial Sequence
  Synthetic
uacagaggcgaccaaaagag

SEQ ID NO: 804470 - RNA, 20 nt, Artificial Sequence
  Synthetic
aaaagcaaacagcaaaagag

SEQ ID NO: 804471 - RNA, 20 nt, Artificial Sequence
  Synthetic
uuauuuaaaaaagaaaagag

SEQ ID NO: 804472 - RNA, 20 nt, Artificial Sequence
  Synthetic
aauaauaauaaagaaaagag

SEQ ID NO: 804473 - RNA, 20 nt, Artificial Sequence
  Synthetic
cccuacaugguagaaaagag

SEQ ID NO: 804474 - RNA, 20 nt, Artificial Sequence
  Synthetic
ugagacauauuugaaaagag

SEQ ID NO: 804475 - RNA, 20 nt, Artificial Sequence
  Synthetic
aggaggaaaucauaaaagag

SEQ ID NO: 804476 - RNA, 20 nt, Artificial Sequence
  Synthetic
uagggauauuuguaaaagag

SEQ ID NO: 804477 - RNA, 20 nt, Artificial Sequence
  Synthetic
uacauacauuauuaaaagag

SEQ ID NO: 804478 - RNA, 20 nt, Artificial Sequence
  Synthetic
aguuaguugaacccaaagag

SEQ ID NO: 804479 - RNA, 20 nt, Artificial Sequence
  Synthetic
accauccacagagcaaagag

SEQ ID NO: 804480 - RNA, 20 nt, Artificial Sequence
  Synthetic
aauaauuaaaaaagaaagag

SEQ ID NO: 804481 - RNA, 20 nt, Artificial Sequence
  Synthetic
uucccuuguaaaagaaagag

SEQ ID NO: 804482 - RNA, 20 nt, Artificial Sequence
  Synthetic
auuuccuuuugcagaaagag

SEQ ID NO: 804483 - RNA, 20 nt, Artificial Sequence
  Synthetic
aguucaaacaagagaaagag

SEQ ID NO: 804484 - RNA, 20 nt, Artificial Sequence
  Synthetic
aaucaacuugagagaaagag

SEQ ID NO: 804485 - RNA, 20 nt, Artificial Sequence
  Synthetic
uaagaaaguuagggaaagag

SEQ ID NO: 804486 - RNA, 20 nt, Artificial Sequence
  Synthetic
auccaguaggggggaaagag

SEQ ID NO: 804487 - RNA, 20 nt, Artificial Sequence
  Synthetic
acucagagauuaugaaagag

SEQ ID NO: 804488 - RNA, 20 nt, Artificial Sequence
  Synthetic
cuaaaggagccuugaaagag

SEQ ID NO: 804489 - RNA, 20 nt, Artificial Sequence
  Synthetic
cccuuucuagaaauaaagag

SEQ ID NO: 804490 - RNA, 20 nt, Artificial Sequence
  Synthetic
agcuggacucagcuaaagag

SEQ ID NO: 804491 - RNA, 20 nt, Artificial Sequence
  Synthetic
uggggccugaaaguaaagag

SEQ ID NO: 804492 - RNA, 20 nt, Artificial Sequence
  Synthetic
uauagaggaggaguaaagag

SEQ ID NO: 804493 - RNA, 20 nt, Artificial Sequence
  Synthetic
uuauucugaaguguaaagag

SEQ ID NO: 804494 - RNA, 20 nt, Artificial Sequence
  Synthetic
aaaagaguguuauuaaagag

SEQ ID NO: 804495 - RNA, 20 nt, Artificial Sequence
  Synthetic
agaaaguuggaacacaagag

SEQ ID NO: 804496 - RNA, 20 nt, Artificial Sequence
  Synthetic
uugcuuuaaucacacaagag

SEQ ID NO: 804497 - RNA, 20 nt, Artificial Sequence
  Synthetic
aauuaugaaaggcacaagag

SEQ ID NO: 804498 - RNA, 20 nt, Artificial Sequence
  Synthetic
ccuuuuuccagggacaagag

SEQ ID NO: 804499 - RNA, 20 nt, Artificial Sequence
  Synthetic
auauugaugggguacaagag

SEQ ID NO: 804500 - RNA, 20 nt, Artificial Sequence
  Synthetic
ucagggcaguuuuccaagag

SEQ ID NO: 804501 - RNA, 20 nt, Artificial Sequence
  Synthetic
aagcaguauuuuagcaagag

SEQ ID NO: 804502 - RNA, 20 nt, Artificial Sequence
  Synthetic
uugauuguuguaugcaagag

SEQ ID NO: 804503 - RNA, 20 nt, Artificial Sequence
  Synthetic
aaagcacuagagaucaagag

SEQ ID NO: 804504 - RNA, 20 nt, Artificial Sequence
  Synthetic
uugaacagaaaucucaagag

SEQ ID NO: 804505 - RNA, 20 nt, Artificial Sequence
  Synthetic
auucacaacugcuucaagag

SEQ ID NO: 804506 - RNA, 20 nt, Artificial Sequence
  Synthetic
aaggaggugacaaagaagag

SEQ ID NO: 804507 - RNA, 20 nt, Artificial Sequence
  Synthetic
aauugaaggagcaagaagag

SEQ ID NO: 804508 - RNA, 20 nt, Artificial Sequence
  Synthetic
auagcuuuuugcaagaagag

SEQ ID NO: 804509 - RNA, 20 nt, Artificial Sequence
  Synthetic
uuaaaaauaaaacagaagag

SEQ ID NO: 804510 - RNA, 20 nt, Artificial Sequence
  Synthetic
uaauuuggcuugcagaagag

SEQ ID NO: 804511 - RNA, 20 nt, Artificial Sequence
  Synthetic
ccaggggagaaagagaagag

SEQ ID NO: 804512 - RNA, 20 nt, Artificial Sequence
  Synthetic
aacauccgaauggagaagag

SEQ ID NO: 804513 - RNA, 20 nt, Artificial Sequence
  Synthetic
agcuauacacuggagaagag

SEQ ID NO: 804514 - RNA, 20 nt, Artificial Sequence
  Synthetic
ugcuaaaauucauagaagag

SEQ ID NO: 804515 - RNA, 20 nt, Artificial Sequence
  Synthetic
ucucaaaauaccuagaagag

SEQ ID NO: 804516 - RNA, 20 nt, Artificial Sequence
  Synthetic
ucucaaaacggcuagaagag

SEQ ID NO: 804517 - RNA, 20 nt, Artificial Sequence
  Synthetic
uaaauuaaucaguagaagag

SEQ ID NO: 804518 - RNA, 20 nt, Artificial Sequence
  Synthetic
ucacgucuaaauuagaagag

SEQ ID NO: 804519 - RNA, 20 nt, Artificial Sequence
  Synthetic
agaauuucaacagcgaagag

SEQ ID NO: 804520 - RNA, 20 nt, Artificial Sequence
  Synthetic
caucugcaaaccaggaagag

SEQ ID NO: 804521 - RNA, 20 nt, Artificial Sequence
  Synthetic
aggcccaaggagaggaagag

SEQ ID NO: 804522 - RNA, 20 nt, Artificial Sequence
  Synthetic
agaagcggagggaggaagag

SEQ ID NO: 804523 - RNA, 20 nt, Artificial Sequence
  Synthetic
agauauucaaauaggaagag

SEQ ID NO: 804524 - RNA, 20 nt, Artificial Sequence
  Synthetic
cacagaauccaagggaagag

SEQ ID NO: 804525 - RNA, 20 nt, Artificial Sequence
  Synthetic
auggcacacagagggaagag

SEQ ID NO: 804526 - RNA, 20 nt, Artificial Sequence
  Synthetic
cuuccuuaauaggggaagag

SEQ ID NO: 804527 - RNA, 20 nt, Artificial Sequence
  Synthetic
aaagaaaguggauggaagag

SEQ ID NO: 804528 - RNA, 20 nt, Artificial Sequence
  Synthetic
aggagcaugagaaugaagag

SEQ ID NO: 804529 - RNA, 20 nt, Artificial Sequence
  Synthetic
ucauuccauuuccugaagag

SEQ ID NO: 804530 - RNA, 20 nt, Artificial Sequence
  Synthetic
uuagcaagaguggugaagag

SEQ ID NO: 804531 - RNA, 20 nt, Artificial Sequence
  Synthetic
aagauaauuucauugaagag

SEQ ID NO: 804532 - RNA, 20 nt, Artificial Sequence
  Synthetic
uuuauagauuauuugaagag

SEQ ID NO: 804533 - RNA, 20 nt, Artificial Sequence
  Synthetic
caaaaaagguguuugaagag

SEQ ID NO: 804534 - RNA, 20 nt, Artificial Sequence
  Synthetic
acugcucaaggaaauaagag

SEQ ID NO: 804535 - RNA, 20 nt, Artificial Sequence
  Synthetic
uaccuaucuggaaauaagag

SEQ ID NO: 804536 - RNA, 20 nt, Artificial Sequence
  Synthetic
uguaaacaaucagauaagag

SEQ ID NO: 804537 - RNA, 20 nt, Artificial Sequence
  Synthetic
cuuccaagaucagauaagag

SEQ ID NO: 804538 - RNA, 20 nt, Artificial Sequence
  Synthetic
aaaaaaaggucagauaagag

SEQ ID NO: 804539 - RNA, 20 nt, Artificial Sequence
  Synthetic
ugaacaauggucucuaagag

SEQ ID NO: 804540 - RNA, 20 nt, Artificial Sequence
  Synthetic
acagagugccuauguaagag

SEQ ID NO: 804541 - RNA, 20 nt, Artificial Sequence
  Synthetic
cagggcagccauauuaagag

SEQ ID NO: 804542 - RNA, 20 nt, Artificial Sequence
  Synthetic
auuuuuuuguaucuuaagag

SEQ ID NO: 804543 - RNA, 20 nt, Artificial Sequence
  Synthetic
acagcuuaaacucuuaagag

SEQ ID NO: 804544 - RNA, 20 nt, Artificial Sequence
  Synthetic
aacuaccaaaagguuaagag

SEQ ID NO: 804545 - RNA, 20 nt, Artificial Sequence
  Synthetic
uuuugguugcuuguuaagag

SEQ ID NO: 804546 - RNA, 20 nt, Artificial Sequence
  Synthetic
aucacuaauauuuuuaagag

SEQ ID NO: 804547 - RNA, 20 nt, Artificial Sequence
  Synthetic
ucaaaaagcuaaaaacagag

SEQ ID NO: 804548 - RNA, 20 nt, Artificial Sequence
  Synthetic
aauaauauucagaaacagag

SEQ ID NO: 804549 - RNA, 20 nt, Artificial Sequence
  Synthetic
ucugagugcaucuaacagag

SEQ ID NO: 804550 - RNA, 20 nt, Artificial Sequence
  Synthetic
uuuguagcauauacacagag

SEQ ID NO: 804551 - RNA, 20 nt, Artificial Sequence
  Synthetic
uggcuuugucuuacacagag

SEQ ID NO: 804552 - RNA, 20 nt, Artificial Sequence
  Synthetic
acuaacgccauuccacagag

SEQ ID NO: 804553 - RNA, 20 nt, Artificial Sequence
  Synthetic
uauuuccuucuuccacagag

SEQ ID NO: 804554 - RNA, 20 nt, Artificial Sequence
  Synthetic
aaagaagcuggagcacagag

SEQ ID NO: 804555 - RNA, 20 nt, Artificial Sequence
  Synthetic
aauuuuacuucugcacagag

SEQ ID NO: 804556 - RNA, 20 nt, Artificial Sequence
  Synthetic
uaaucuugaaagagacagag

SEQ ID NO: 804557 - RNA, 20 nt, Artificial Sequence
  Synthetic
uggcgggaagagagacagag

SEQ ID NO: 804558 - RNA, 20 nt, Artificial Sequence
  Synthetic
accaaaagagugagacagag

SEQ ID NO: 804559 - RNA, 20 nt, Artificial Sequence
  Synthetic
uuaaaagagaauagacagag

SEQ ID NO: 804560 - RNA, 20 nt, Artificial Sequence
  Synthetic
ugcacaaacaagcgacagag

SEQ ID NO: 804561 - RNA, 20 nt, Artificial Sequence
  Synthetic
agagcuagucagugacagag

SEQ ID NO: 804562 - RNA, 20 nt, Artificial Sequence
  Synthetic
uccaauuuuucaauacagag

SEQ ID NO: 804563 - RNA, 20 nt, Artificial Sequence
  Synthetic
aaaaagaugugcauacagag

SEQ ID NO: 804564 - RNA, 20 nt, Artificial Sequence
  Synthetic
auaagaugcaguauacagag

SEQ ID NO: 804565 - RNA, 20 nt, Artificial Sequence
  Synthetic
acaugaguagaacuacagag

SEQ ID NO: 804566 - RNA, 20 nt, Artificial Sequence
  Synthetic
uuacaguauccacuacagag

SEQ ID NO: 804567 - RNA, 20 nt, Artificial Sequence
  Synthetic
uauaagaagacaaaccagag

SEQ ID NO: 804568 - RNA, 20 nt, Artificial Sequence
  Synthetic
ucucucucucgaaaccagag

SEQ ID NO: 804569 - RNA, 20 nt, Artificial Sequence
  Synthetic
cagagaugugacaaccagag

SEQ ID NO: 804570 - RNA, 20 nt, Artificial Sequence
  Synthetic
aucaacaucccacaccagag

SEQ ID NO: 804571 - RNA, 20 nt, Artificial Sequence
  Synthetic
cagccaaggagugaccagag

SEQ ID NO: 804572 - RNA, 20 nt, Artificial Sequence
  Synthetic
cacagggcaaaauaccagag

SEQ ID NO: 804573 - RNA, 20 nt, Artificial Sequence
  Synthetic
auguaaaaugcauaccagag

SEQ ID NO: 804574 - RNA, 20 nt, Artificial Sequence
  Synthetic
uaaaaugaaggguaccagag

SEQ ID NO: 804575 - RNA, 20 nt, Artificial Sequence
  Synthetic
agagguuccaaaacccagag

SEQ ID NO: 804576 - RNA, 20 nt, Artificial Sequence
  Synthetic
aaucaccauaaagcccagag

SEQ ID NO: 804577 - RNA, 20 nt, Artificial Sequence
  Synthetic
ugcaaaacuguggcccagag

SEQ ID NO: 804578 - RNA, 20 nt, Artificial Sequence
  Synthetic
cuggaagcuucaucccagag

SEQ ID NO: 804579 - RNA, 20 nt, Artificial Sequence
  Synthetic
uuacagggaaaaggccagag

SEQ ID NO: 804580 - RNA, 20 nt, Artificial Sequence
  Synthetic
uggagcuugaacauccagag

SEQ ID NO: 804581 - RNA, 20 nt, Artificial Sequence
  Synthetic
aaggagcuaaauauccagag

SEQ ID NO: 804582 - RNA, 20 nt, Artificial Sequence
  Synthetic
uccugccucagccuccagag

SEQ ID NO: 804583 - RNA, 20 nt, Artificial Sequence
  Synthetic
cccaagucugauguccagag

SEQ ID NO: 804584 - RNA, 20 nt, Artificial Sequence
  Synthetic
uauuaccuauguuuccagag

SEQ ID NO: 804585 - RNA, 20 nt, Artificial Sequence
  Synthetic
uuauuaaguaagaagcagag

SEQ ID NO: 804586 - RNA, 20 nt, Artificial Sequence
  Synthetic
uccaagugcugacagcagag

SEQ ID NO: 804587 - RNA, 20 nt, Artificial Sequence
  Synthetic
ucugcacugucccagcagag

SEQ ID NO: 804588 - RNA, 20 nt, Artificial Sequence
  Synthetic
uauagcuuacugcagcagag

SEQ ID NO: 804589 - RNA, 20 nt, Artificial Sequence
  Synthetic
aaguauaauuuguagcagag

SEQ ID NO: 804590 - RNA, 20 nt, Artificial Sequence
  Synthetic
ccauacagaaaaaggcagag

SEQ ID NO: 804591 - RNA, 20 nt, Artificial Sequence
  Synthetic
aaacuucugaaaaggcagag

SEQ ID NO: 804592 - RNA, 20 nt, Artificial Sequence
  Synthetic
aagacucagaaggggcagag

SEQ ID NO: 804593 - RNA, 20 nt, Artificial Sequence
  Synthetic
aaaauauccuuguggcagag

SEQ ID NO: 804594 - RNA, 20 nt, Artificial Sequence
  Synthetic
aaacaggaaccucugcagag

SEQ ID NO: 804595 - RNA, 20 nt, Artificial Sequence
  Synthetic
acauuucugcaagugcagag

SEQ ID NO: 804596 - RNA, 20 nt, Artificial Sequence
  Synthetic
uacauggauauauugcagag

SEQ ID NO: 804597 - RNA, 20 nt, Artificial Sequence
  Synthetic
uguacucucccaaaucagag

SEQ ID NO: 804598 - RNA, 20 nt, Artificial Sequence
  Synthetic
agaaaacuucacaaucagag

SEQ ID NO: 804599 - RNA, 20 nt, Artificial Sequence
  Synthetic
ugagaaacugagaaucagag

SEQ ID NO: 804600 - RNA, 20 nt, Artificial Sequence
  Synthetic
agaauucaucaagaucagag

SEQ ID NO: 804601 - RNA, 20 nt, Artificial Sequence
  Synthetic
ugaaagggagaaacucagag

SEQ ID NO: 804602 - RNA, 20 nt, Artificial Sequence
  Synthetic
agggcacuucucacucagag

SEQ ID NO: 804603 - RNA, 20 nt, Artificial Sequence
  Synthetic
uccaaagagaagccucagag

SEQ ID NO: 804604 - RNA, 20 nt, Artificial Sequence
  Synthetic
agaaucaugaucucucagag

SEQ ID NO: 804605 - RNA, 20 nt, Artificial Sequence
  Synthetic
auuagaaagcagucucagag

SEQ ID NO: 804606 - RNA, 20 nt, Artificial Sequence
  Synthetic
uuauguagaauuucucagag

SEQ ID NO: 804607 - RNA, 20 nt, Artificial Sequence
  Synthetic
uuauaagaaggaagucagag

SEQ ID NO: 804608 - RNA, 20 nt, Artificial Sequence
  Synthetic
accagugggauaggucagag

SEQ ID NO: 804609 - RNA, 20 nt, Artificial Sequence
  Synthetic
ucuugaaagcguggucagag

SEQ ID NO: 804610 - RNA, 20 nt, Artificial Sequence
  Synthetic
ccaagauaaaaaugucagag

SEQ ID NO: 804611 - RNA, 20 nt, Artificial Sequence
  Synthetic
aaaaauuauucacuucagag

SEQ ID NO: 804612 - RNA, 20 nt, Artificial Sequence
  Synthetic
uagaaagcagaauuucagag

SEQ ID NO: 804613 - RNA, 20 nt, Artificial Sequence
  Synthetic
caugagcagagcuuucagag

SEQ ID NO: 804614 - RNA, 20 nt, Artificial Sequence
  Synthetic
uuuaaaaaugaaaaagagag

SEQ ID NO: 804615 - RNA, 20 nt, Artificial Sequence
  Synthetic
aguaccagaccucaagagag

SEQ ID NO: 804616 - RNA, 20 nt, Artificial Sequence
  Synthetic
uacuugauuuuucaagagag

SEQ ID NO: 804617 - RNA, 20 nt, Artificial Sequence
  Synthetic
cccuacaagccagaagagag

SEQ ID NO: 804618 - RNA, 20 nt, Artificial Sequence
  Synthetic
cuuacaccaugagaagagag

SEQ ID NO: 804619 - RNA, 20 nt, Artificial Sequence
  Synthetic
cccuacaagcuagaagagag

SEQ ID NO: 804620 - RNA, 20 nt, Artificial Sequence
  Synthetic
ugacucugcaaggaagagag

SEQ ID NO: 804621 - RNA, 20 nt, Artificial Sequence
  Synthetic
augcuagugaaugaagagag

SEQ ID NO: 804622 - RNA, 20 nt, Artificial Sequence
  Synthetic
uaaauugguaccacagagag

SEQ ID NO: 804623 - RNA, 20 nt, Artificial Sequence
  Synthetic
aaacugaggcucacagagag

SEQ ID NO: 804624 - RNA, 20 nt, Artificial Sequence
  Synthetic
agcuagcuagagacagagag

SEQ ID NO: 804625 - RNA, 20 nt, Artificial Sequence
  Synthetic
cacaaacaagcgacagagag

SEQ ID NO: 804626 - RNA, 20 nt, Artificial Sequence
  Synthetic
ccuuucccauuuacagagag

SEQ ID NO: 804627 - RNA, 20 nt, Artificial Sequence
  Synthetic
uaaauugguacugcagagag

SEQ ID NO: 804628 - RNA, 20 nt, Artificial Sequence
  Synthetic
agaaugagaugaucagagag

SEQ ID NO: 804629 - RNA, 20 nt, Artificial Sequence
  Synthetic
uacaaauagaucucagagag

SEQ ID NO: 804630 - RNA, 20 nt, Artificial Sequence
  Synthetic
agaaacagagaaagagagag

SEQ ID NO: 804631 - RNA, 20 nt, Artificial Sequence
  Synthetic
caagggaaggaaagagagag

SEQ ID NO: 804632 - RNA, 20 nt, Artificial Sequence
  Synthetic
agagcauaaacaagagagag

SEQ ID NO: 804633 - RNA, 20 nt, Artificial Sequence
  Synthetic
uaccagaccucaagagagag

SEQ ID NO: 804634 - RNA, 20 nt, Artificial Sequence
  Synthetic
agagagagagacagagagag

SEQ ID NO: 804635 - RNA, 20 nt, Artificial Sequence
  Synthetic
agcauaaacaagagagagag

SEQ ID NO: 804636 - RNA, 20 nt, Artificial Sequence
  Synthetic
agacagagcaagagagagag

SEQ ID NO: 804637 - RNA, 20 nt, Artificial Sequence
  Synthetic
agagagagagagagagagag

SEQ ID NO: 804638 - RNA, 20 nt, Artificial Sequence
  Synthetic
auauggagagagagagagag

SEQ ID NO: 804639 - RNA, 20 nt, Artificial Sequence
  Synthetic
uuuuuuuaauugagagagag

SEQ ID NO: 804640 - RNA, 20 nt, Artificial Sequence
  Synthetic
cagcaggauugaggagagag

SEQ ID NO: 804641 - RNA, 20 nt, Artificial Sequence
  Synthetic
agagggagagagggagagag

SEQ ID NO: 804642 - RNA, 20 nt, Artificial Sequence
  Synthetic
ccugagaugucaugagagag

SEQ ID NO: 804643 - RNA, 20 nt, Artificial Sequence
  Synthetic
uuuuuaaaaaacugagagag

SEQ ID NO: 804644 - RNA, 20 nt, Artificial Sequence
  Synthetic
cagaccucauccugagagag

SEQ ID NO: 804645 - RNA, 20 nt, Artificial Sequence
  Synthetic
uucucuaaugugugagagag

SEQ ID NO: 804646 - RNA, 20 nt, Artificial Sequence
  Synthetic
uauuucagcuuaauagagag

SEQ ID NO: 804647 - RNA, 20 nt, Artificial Sequence
  Synthetic
aaaaccaaaucuauagagag

SEQ ID NO: 804648 - RNA, 20 nt, Artificial Sequence
  Synthetic
auacaacaaaaucuagagag

SEQ ID NO: 804649 - RNA, 20 nt, Artificial Sequence
  Synthetic
ugguauuaaauaguagagag

SEQ ID NO: 804650 - RNA, 20 nt, Artificial Sequence
  Synthetic
aaugguagggagguagagag

SEQ ID NO: 804651 - RNA, 20 nt, Artificial Sequence
  Synthetic
ucugacauugcauuagagag

SEQ ID NO: 804652 - RNA, 20 nt, Artificial Sequence
  Synthetic
aauucugugaaugccgagag

SEQ ID NO: 804653 - RNA, 20 nt, Artificial Sequence
  Synthetic
ccaggcagaaauuccgagag

SEQ ID NO: 804654 - RNA, 20 nt, Artificial Sequence
  Synthetic
agggaggauagaaaggagag

SEQ ID NO: 804655 - RNA, 20 nt, Artificial Sequence
  Synthetic
aagaagggaggaaaggagag

SEQ ID NO: 804656 - RNA, 20 nt, Artificial Sequence
  Synthetic
agaagggggaggaaggagag

SEQ ID NO: 804657 - RNA, 20 nt, Artificial Sequence
  Synthetic
aagagaagugugaaggagag

SEQ ID NO: 804658 - RNA, 20 nt, Artificial Sequence
  Synthetic
aaaaaaaggaauaaggagag

SEQ ID NO: 804659 - RNA, 20 nt, Artificial Sequence
  Synthetic
auaacaauuucccaggagag

SEQ ID NO: 804660 - RNA, 20 nt, Artificial Sequence
  Synthetic
uguaaaagcagccaggagag

SEQ ID NO: 804661 - RNA, 20 nt, Artificial Sequence
  Synthetic
ugaaaauggaagcaggagag

SEQ ID NO: 804662 - RNA, 20 nt, Artificial Sequence
  Synthetic
uauuuggacaaggaggagag

SEQ ID NO: 804663 - RNA, 20 nt, Artificial Sequence
  Synthetic
aggaaguaccaguaggagag

SEQ ID NO: 804664 - RNA, 20 nt, Artificial Sequence
  Synthetic
agagagggaggaagggagag

SEQ ID NO: 804665 - RNA, 20 nt, Artificial Sequence
  Synthetic
auaggguguggaagggagag

SEQ ID NO: 804666 - RNA, 20 nt, Artificial Sequence
  Synthetic
agagagagagagagggagag

SEQ ID NO: 804667 - RNA, 20 nt, Artificial Sequence
  Synthetic
agagagggagagagggagag

SEQ ID NO: 804668 - RNA, 20 nt, Artificial Sequence
  Synthetic
aagggaggagggagggagag

SEQ ID NO: 804669 - RNA, 20 nt, Artificial Sequence
  Synthetic
cggcugggagggagggagag

SEQ ID NO: 804670 - RNA, 20 nt, Artificial Sequence
  Synthetic
ugccauuaugggagggagag

SEQ ID NO: 804671 - RNA, 20 nt, Artificial Sequence
  Synthetic
agaaauaggaguagggagag

SEQ ID NO: 804672 - RNA, 20 nt, Artificial Sequence
  Synthetic
acauuggggaguagggagag

SEQ ID NO: 804673 - RNA, 20 nt, Artificial Sequence
  Synthetic
cugagaguacggggggagag

SEQ ID NO: 804674 - RNA, 20 nt, Artificial Sequence
  Synthetic
uuaaacaaggguggggagag

SEQ ID NO: 804675 - RNA, 20 nt, Artificial Sequence
  Synthetic
uccucguauguuggggagag

SEQ ID NO: 804676 - RNA, 20 nt, Artificial Sequence
  Synthetic
cuuccuccuuugugggagag

SEQ ID NO: 804677 - RNA, 20 nt, Artificial Sequence
  Synthetic
agccuggaaagaauggagag

SEQ ID NO: 804678 - RNA, 20 nt, Artificial Sequence
  Synthetic
augcaggcauuacuggagag

SEQ ID NO: 804679 - RNA, 20 nt, Artificial Sequence
  Synthetic
uccuaaauugagcuggagag

SEQ ID NO: 804680 - RNA, 20 nt, Artificial Sequence
  Synthetic
cagcuauuuauucuggagag

SEQ ID NO: 804681 - RNA, 20 nt, Artificial Sequence
  Synthetic
auugaaaaguagguggagag

SEQ ID NO: 804682 - RNA, 20 nt, Artificial Sequence
  Synthetic
ugaucagaaacauuggagag

SEQ ID NO: 804683 - RNA, 20 nt, Artificial Sequence
  Synthetic
ugaucaaaaaacuuggagag

SEQ ID NO: 804684 - RNA, 20 nt, Artificial Sequence
  Synthetic
aaacagaaauucuuggagag

SEQ ID NO: 804685 - RNA, 20 nt, Artificial Sequence
  Synthetic
aaagaauucacuuuggagag

SEQ ID NO: 804686 - RNA, 20 nt, Artificial Sequence
  Synthetic
acugcucaaggaaaugagag

SEQ ID NO: 804687 - RNA, 20 nt, Artificial Sequence
  Synthetic
aacucauaauagaaugagag

SEQ ID NO: 804688 - RNA, 20 nt, Artificial Sequence
  Synthetic
uugcagaauuggaaugagag

SEQ ID NO: 804689 - RNA, 20 nt, Artificial Sequence
  Synthetic
aguaagagugugaaugagag

SEQ ID NO: 804690 - RNA, 20 nt, Artificial Sequence
  Synthetic
acugggagggaacaugagag

SEQ ID NO: 804691 - RNA, 20 nt, Artificial Sequence
  Synthetic
cagggcaacacagaugagag

SEQ ID NO: 804692 - RNA, 20 nt, Artificial Sequence
  Synthetic
cacgucugcugggaugagag

SEQ ID NO: 804693 - RNA, 20 nt, Artificial Sequence
  Synthetic
uaaucauuuaguuaugagag

SEQ ID NO: 804694 - RNA, 20 nt, Artificial Sequence
  Synthetic
aguuguaugaaugcugagag

SEQ ID NO: 804695 - RNA, 20 nt, Artificial Sequence
  Synthetic
uagagugaaguaagugagag

SEQ ID NO: 804696 - RNA, 20 nt, Artificial Sequence
  Synthetic
agugcuuuucugagugagag

SEQ ID NO: 804697 - RNA, 20 nt, Artificial Sequence
  Synthetic
uugaauaggagcggugagag

SEQ ID NO: 804698 - RNA, 20 nt, Artificial Sequence
  Synthetic
aaaagaauucagggugagag

SEQ ID NO: 804699 - RNA, 20 nt, Artificial Sequence
  Synthetic
uguaugggguauggugagag

SEQ ID NO: 804700 - RNA, 20 nt, Artificial Sequence
  Synthetic
uugaauaggaguggugagag

SEQ ID NO: 804701 - RNA, 20 nt, Artificial Sequence
  Synthetic
cuuucucuaaugugugagag

SEQ ID NO: 804702 - RNA, 20 nt, Artificial Sequence
  Synthetic
uaaacaaaugugugugagag

SEQ ID NO: 804703 - RNA, 20 nt, Artificial Sequence
  Synthetic
uaauuuccuccccuugagag

SEQ ID NO: 804704 - RNA, 20 nt, Artificial Sequence
  Synthetic
ugguauguguggcuugagag

SEQ ID NO: 804705 - RNA, 20 nt, Artificial Sequence
  Synthetic
aagaauuuagaaaaauagag

SEQ ID NO: 804706 - RNA, 20 nt, Artificial Sequence
  Synthetic
accagaucuuguaaauagag

SEQ ID NO: 804707 - RNA, 20 nt, Artificial Sequence
  Synthetic
cagggaaagaaagaauagag

SEQ ID NO: 804708 - RNA, 20 nt, Artificial Sequence
  Synthetic
aaacugcaaacagaauagag

SEQ ID NO: 804709 - RNA, 20 nt, Artificial Sequence
  Synthetic
auugaugagguugaauagag

SEQ ID NO: 804710 - RNA, 20 nt, Artificial Sequence
  Synthetic
auaaccaaagccacauagag

SEQ ID NO: 804711 - RNA, 20 nt, Artificial Sequence
  Synthetic
acaucaaaaauuacauagag

SEQ ID NO: 804712 - RNA, 20 nt, Artificial Sequence
  Synthetic
uaguaaggaauuacauagag

SEQ ID NO: 804713 - RNA, 20 nt, Artificial Sequence
  Synthetic
uccaaucaaaaggcauagag

SEQ ID NO: 804714 - RNA, 20 nt, Artificial Sequence
  Synthetic
ucaccagucuaaagauagag

SEQ ID NO: 804715 - RNA, 20 nt, Artificial Sequence
  Synthetic
uauaaagaauuaugauagag

SEQ ID NO: 804716 - RNA, 20 nt, Artificial Sequence
  Synthetic
agaagauaaaauauauagag

SEQ ID NO: 804717 - RNA, 20 nt, Artificial Sequence
  Synthetic
ugcacuuuuauguuauagag

SEQ ID NO: 804718 - RNA, 20 nt, Artificial Sequence
  Synthetic
aauaaaaguaaaaacuagag

SEQ ID NO: 804719 - RNA, 20 nt, Artificial Sequence
  Synthetic
aaugauuacuuggacuagag

SEQ ID NO: 804720 - RNA, 20 nt, Artificial Sequence
  Synthetic
ccaccuuacagcuacuagag

SEQ ID NO: 804721 - RNA, 20 nt, Artificial Sequence
  Synthetic
aagccuugccuaaccuagag

SEQ ID NO: 804722 - RNA, 20 nt, Artificial Sequence
  Synthetic
uguguuuuuaaaagcuagag

SEQ ID NO: 804723 - RNA, 20 nt, Artificial Sequence
  Synthetic
cuuucauuuguuggcuagag

SEQ ID NO: 804724 - RNA, 20 nt, Artificial Sequence
  Synthetic
cagagagaaggaaucuagag

SEQ ID NO: 804725 - RNA, 20 nt, Artificial Sequence
  Synthetic
cacauacucaucaucuagag

SEQ ID NO: 804726 - RNA, 20 nt, Artificial Sequence
  Synthetic
uugauucauuagcucuagag

SEQ ID NO: 804727 - RNA, 20 nt, Artificial Sequence
  Synthetic
aaaguaagacaauucuagag

SEQ ID NO: 804728 - RNA, 20 nt, Artificial Sequence
  Synthetic
aaaaacgaugcaaaguagag

SEQ ID NO: 804729 - RNA, 20 nt, Artificial Sequence
  Synthetic
uuuagagacagaaaguagag

SEQ ID NO: 804730 - RNA, 20 nt, Artificial Sequence
  Synthetic
uagauggagagaaaguagag

SEQ ID NO: 804731 - RNA, 20 nt, Artificial Sequence
  Synthetic
agcaauaaguccaaguagag

SEQ ID NO: 804732 - RNA, 20 nt, Artificial Sequence
  Synthetic
uuaagaauucagaaguagag

SEQ ID NO: 804733 - RNA, 20 nt, Artificial Sequence
  Synthetic
auuuuguauuuuaaguagag

SEQ ID NO: 804734 - RNA, 20 nt, Artificial Sequence
  Synthetic
cucuuguauucaggguagag

SEQ ID NO: 804735 - RNA, 20 nt, Artificial Sequence
  Synthetic
agccauaauauuggguagag

SEQ ID NO: 804736 - RNA, 20 nt, Artificial Sequence
  Synthetic
augagaagaagaugguagag

SEQ ID NO: 804737 - RNA, 20 nt, Artificial Sequence
  Synthetic
uaauaucagagaugguagag

SEQ ID NO: 804738 - RNA, 20 nt, Artificial Sequence
  Synthetic
cagugucugcagugguagag

SEQ ID NO: 804739 - RNA, 20 nt, Artificial Sequence
  Synthetic
aacaauaaagucaauuagag

SEQ ID NO: 804740 - RNA, 20 nt, Artificial Sequence
  Synthetic
accuauuuuguucauuagag

SEQ ID NO: 804741 - RNA, 20 nt, Artificial Sequence
  Synthetic
agucucugaggugguuagag

SEQ ID NO: 804742 - RNA, 20 nt, Artificial Sequence
  Synthetic
aguugacaauaaauuuagag

SEQ ID NO: 804743 - RNA, 20 nt, Artificial Sequence
  Synthetic
uuauucagaaacauuuagag

SEQ ID NO: 804744 - RNA, 20 nt, Artificial Sequence
  Synthetic
cuagaauaaccaguuuagag

SEQ ID NO: 804745 - RNA, 20 nt, Artificial Sequence
  Synthetic
aaggagccugagguuuagag

SEQ ID NO: 804746 - RNA, 20 nt, Artificial Sequence
  Synthetic
uaagccaguaacuuuuagag

SEQ ID NO: 804747 - RNA, 20 nt, Artificial Sequence
  Synthetic
ucagauaggcaguuuuagag

SEQ ID NO: 804748 - RNA, 20 nt, Artificial Sequence
  Synthetic
aaaaugggauauuuuuagag

SEQ ID NO: 804749 - RNA, 20 nt, Artificial Sequence
  Synthetic
aauauuauguugaauacgag

SEQ ID NO: 804750 - RNA, 20 nt, Artificial Sequence
  Synthetic
cucugucucagccucccgag

SEQ ID NO: 804751 - RNA, 20 nt, Artificial Sequence
  Synthetic
ucauuuuuaagaucuccgag

SEQ ID NO: 804752 - RNA, 20 nt, Artificial Sequence
  Synthetic
uaccaggcagaaauuccgag

SEQ ID NO: 804753 - RNA, 20 nt, Artificial Sequence
  Synthetic
cucuauauucuguuuccgag

SEQ ID NO: 804754 - RNA, 20 nt, Artificial Sequence
  Synthetic
uggagggugggaggagcgag

SEQ ID NO: 804755 - RNA, 20 nt, Artificial Sequence
  Synthetic
uugcagggugagugagcgag

SEQ ID NO: 804756 - RNA, 20 nt, Artificial Sequence
  Synthetic
uggagacucagaagggcgag

SEQ ID NO: 804757 - RNA, 20 nt, Artificial Sequence
  Synthetic
cugucgggggguggggcgag

SEQ ID NO: 804758 - RNA, 20 nt, Artificial Sequence
  Synthetic
cagcccaugggcuuugcgag

SEQ ID NO: 804759 - RNA, 20 nt, Artificial Sequence
  Synthetic
acauuuauagcaaaaucgag

SEQ ID NO: 804760 - RNA, 20 nt, Artificial Sequence
  Synthetic
uguagucccagcuacucgag

SEQ ID NO: 804761 - RNA, 20 nt, Artificial Sequence
  Synthetic
aacaccagacaaaucucgag

SEQ ID NO: 804762 - RNA, 20 nt, Artificial Sequence
  Synthetic
acacaccggggccugucgag

SEQ ID NO: 804763 - RNA, 20 nt, Artificial Sequence
  Synthetic
cagcuucuguugaguucgag

SEQ ID NO: 804764 - RNA, 20 nt, Artificial Sequence
  Synthetic
cagguaaaaaguaaaaggag

SEQ ID NO: 804765 - RNA, 20 nt, Artificial Sequence
  Synthetic
uaaauaccuauacaaaggag

SEQ ID NO: 804766 - RNA, 20 nt, Artificial Sequence
  Synthetic
acccugcaacgccaaaggag

SEQ ID NO: 804767 - RNA, 20 nt, Artificial Sequence
  Synthetic
ugucuugguugccaaaggag

SEQ ID NO: 804768 - RNA, 20 nt, Artificial Sequence
  Synthetic
auccccaggugucaaaggag

SEQ ID NO: 804769 - RNA, 20 nt, Artificial Sequence
  Synthetic
ucaaccaacaaauaaaggag

SEQ ID NO: 804770 - RNA, 20 nt, Artificial Sequence
  Synthetic
ucaaggguuaaguaaaggag

SEQ ID NO: 804771 - RNA, 20 nt, Artificial Sequence
  Synthetic
agagcauaaagaacaaggag

SEQ ID NO: 804772 - RNA, 20 nt, Artificial Sequence
  Synthetic
cccacuguggggacaaggag

SEQ ID NO: 804773 - RNA, 20 nt, Artificial Sequence
  Synthetic
cugcugugugcagcaaggag

SEQ ID NO: 804774 - RNA, 20 nt, Artificial Sequence
  Synthetic
agaaugcgaaggucaaggag

SEQ ID NO: 804775 - RNA, 20 nt, Artificial Sequence
  Synthetic
accaauccauauucaaggag

SEQ ID NO: 804776 - RNA, 20 nt, Artificial Sequence
  Synthetic
cauccuaaaaacagaaggag

SEQ ID NO: 804777 - RNA, 20 nt, Artificial Sequence
  Synthetic
caagaaggagggagaaggag

SEQ ID NO: 804778 - RNA, 20 nt, Artificial Sequence
  Synthetic
uuggaaucugguagaaggag

SEQ ID NO: 804779 - RNA, 20 nt, Artificial Sequence
  Synthetic
cuagaagggggaggaaggag

SEQ ID NO: 804780 - RNA, 20 nt, Artificial Sequence
  Synthetic
uggggaaggcuaggaaggag

SEQ ID NO: 804781 - RNA, 20 nt, Artificial Sequence
  Synthetic
agggaagggaagggaaggag

SEQ ID NO: 804782 - RNA, 20 nt, Artificial Sequence
  Synthetic
agagggagaaugggaaggag

SEQ ID NO: 804783 - RNA, 20 nt, Artificial Sequence
  Synthetic
aguuucuucaucugaaggag

SEQ ID NO: 804784 - RNA, 20 nt, Artificial Sequence
  Synthetic
caauauuuugauauaaggag

SEQ ID NO: 804785 - RNA, 20 nt, Artificial Sequence
  Synthetic
uuuguauaugguguaaggag

SEQ ID NO: 804786 - RNA, 20 nt, Artificial Sequence
  Synthetic
ccuuacuuuugcuuaaggag

SEQ ID NO: 804787 - RNA, 20 nt, Artificial Sequence
  Synthetic
aaaauucagacuuuaaggag

SEQ ID NO: 804788 - RNA, 20 nt, Artificial Sequence
  Synthetic
acaaaacaaacaaacaggag

SEQ ID NO: 804789 - RNA, 20 nt, Artificial Sequence
  Synthetic
aagaugccauuuaacaggag

SEQ ID NO: 804790 - RNA, 20 nt, Artificial Sequence
  Synthetic
cuggagcagggagacaggag

SEQ ID NO: 804791 - RNA, 20 nt, Artificial Sequence
  Synthetic
uaaaugaauauagacaggag

SEQ ID NO: 804792 - RNA, 20 nt, Artificial Sequence
  Synthetic
augcuagaucugcccaggag

SEQ ID NO: 804793 - RNA, 20 nt, Artificial Sequence
  Synthetic
ccuguaaaagcagccaggag

SEQ ID NO: 804794 - RNA, 20 nt, Artificial Sequence
  Synthetic
agaaagaaaugcuccaggag

SEQ ID NO: 804795 - RNA, 20 nt, Artificial Sequence
  Synthetic
agcaagaagagaggcaggag

SEQ ID NO: 804796 - RNA, 20 nt, Artificial Sequence
  Synthetic
uaaagaguaaugggcaggag

SEQ ID NO: 804797 - RNA, 20 nt, Artificial Sequence
  Synthetic
uauaugucaugauucaggag

SEQ ID NO: 804798 - RNA, 20 nt, Artificial Sequence
  Synthetic
caaacagcaaaagagaggag

SEQ ID NO: 804799 - RNA, 20 nt, Artificial Sequence
  Synthetic
uaugaaagagaggagaggag

SEQ ID NO: 804800 - RNA, 20 nt, Artificial Sequence
  Synthetic
aggagguggagggagaggag

SEQ ID NO: 804801 - RNA, 20 nt, Artificial Sequence
  Synthetic
aaaaaagguugggagaggag

SEQ ID NO: 804802 - RNA, 20 nt, Artificial Sequence
  Synthetic
ccccacugggcuacgaggag

SEQ ID NO: 804803 - RNA, 20 nt, Artificial Sequence
  Synthetic
aggcacuccgaaaggaggag

SEQ ID NO: 804804 - RNA, 20 nt, Artificial Sequence
  Synthetic
agggaacaggaaaggaggag

SEQ ID NO: 804805 - RNA, 20 nt, Artificial Sequence
  Synthetic
aggaggaggagcaggaggag

SEQ ID NO: 804806 - RNA, 20 nt, Artificial Sequence
  Synthetic
uguuguggguggaggaggag

SEQ ID NO: 804807 - RNA, 20 nt, Artificial Sequence
  Synthetic
auacaaaaagaagggaggag

SEQ ID NO: 804808 - RNA, 20 nt, Artificial Sequence
  Synthetic
aaagagagggacgggaggag

SEQ ID NO: 804809 - RNA, 20 nt, Artificial Sequence
  Synthetic
caucuuuggcgggggaggag

SEQ ID NO: 804810 - RNA, 20 nt, Artificial Sequence
  Synthetic
uuuugagacuuugggaggag

SEQ ID NO: 804811 - RNA, 20 nt, Artificial Sequence
  Synthetic
cuggaaugugccuggaggag

SEQ ID NO: 804812 - RNA, 20 nt, Artificial Sequence
  Synthetic
acugaauuaaggaugaggag

SEQ ID NO: 804813 - RNA, 20 nt, Artificial Sequence
  Synthetic
augaguuccagacugaggag

SEQ ID NO: 804814 - RNA, 20 nt, Artificial Sequence
  Synthetic
aggcaagauauauugaggag

SEQ ID NO: 804815 - RNA, 20 nt, Artificial Sequence
  Synthetic
aacacuauguugaauaggag

SEQ ID NO: 804816 - RNA, 20 nt, Artificial Sequence
  Synthetic
aauacuauguugaauaggag

SEQ ID NO: 804817 - RNA, 20 nt, Artificial Sequence
  Synthetic
uucuagguuuuugauaggag

SEQ ID NO: 804818 - RNA, 20 nt, Artificial Sequence
  Synthetic
agacagauuguuccuaggag

SEQ ID NO: 804819 - RNA, 20 nt, Artificial Sequence
  Synthetic
auacaaaaaauagcuaggag

SEQ ID NO: 804820 - RNA, 20 nt, Artificial Sequence
  Synthetic
aacggcuucaggucuaggag

SEQ ID NO: 804821 - RNA, 20 nt, Artificial Sequence
  Synthetic
aacagaaaaaaaauuaggag

SEQ ID NO: 804822 - RNA, 20 nt, Artificial Sequence
  Synthetic
agaauaccaagaauuaggag

SEQ ID NO: 804823 - RNA, 20 nt, Artificial Sequence
  Synthetic
cucuagaaguccauuaggag

SEQ ID NO: 804824 - RNA, 20 nt, Artificial Sequence
  Synthetic
aucaguugggugauuaggag

SEQ ID NO: 804825 - RNA, 20 nt, Artificial Sequence
  Synthetic
auuauaaaugaaguuaggag

SEQ ID NO: 804826 - RNA, 20 nt, Artificial Sequence
  Synthetic
uuuguuuguuuauuuaggag

SEQ ID NO: 804827 - RNA, 20 nt, Artificial Sequence
  Synthetic
ucacucuugagcuuuaggag

SEQ ID NO: 804828 - RNA, 20 nt, Artificial Sequence
  Synthetic
uucaaaaaagugagacggag

SEQ ID NO: 804829 - RNA, 20 nt, Artificial Sequence
  Synthetic
ccacugcacugccuacggag

SEQ ID NO: 804830 - RNA, 20 nt, Artificial Sequence
  Synthetic
uucacuuuuauguuacggag

SEQ ID NO: 804831 - RNA, 20 nt, Artificial Sequence
  Synthetic
ccuagucauuagaaagggag

SEQ ID NO: 804832 - RNA, 20 nt, Artificial Sequence
  Synthetic
uacacugcugggaaagggag

SEQ ID NO: 804833 - RNA, 20 nt, Artificial Sequence
  Synthetic
ucagagucucuuaaagggag

SEQ ID NO: 804834 - RNA, 20 nt, Artificial Sequence
  Synthetic
aacgguuuuaaccaagggag

SEQ ID NO: 804835 - RNA, 20 nt, Artificial Sequence
  Synthetic
uaaccugggaaucaagggag

SEQ ID NO: 804836 - RNA, 20 nt, Artificial Sequence
  Synthetic
cuuaguaacccagaagggag

SEQ ID NO: 804837 - RNA, 20 nt, Artificial Sequence
  Synthetic
ucacuguugagagaagggag

SEQ ID NO: 804838 - RNA, 20 nt, Artificial Sequence
  Synthetic
ugguggugaugggaagggag

SEQ ID NO: 804839 - RNA, 20 nt, Artificial Sequence
  Synthetic
augugugugugggaagggag

SEQ ID NO: 804840 - RNA, 20 nt, Artificial Sequence
  Synthetic
uaggagcugguugaagggag

SEQ ID NO: 804841 - RNA, 20 nt, Artificial Sequence
  Synthetic
cugcaucaauaauaagggag

SEQ ID NO: 804842 - RNA, 20 nt, Artificial Sequence
  Synthetic
agcuggcauggcuaagggag

SEQ ID NO: 804843 - RNA, 20 nt, Artificial Sequence
  Synthetic
aaauguuaauauuaagggag

SEQ ID NO: 804844 - RNA, 20 nt, Artificial Sequence
  Synthetic
uagcuauuucuuuaagggag

SEQ ID NO: 804845 - RNA, 20 nt, Artificial Sequence
  Synthetic
aacuaugagguuuaagggag

SEQ ID NO: 804846 - RNA, 20 nt, Artificial Sequence
  Synthetic
aaacauauggacacagggag

SEQ ID NO: 804847 - RNA, 20 nt, Artificial Sequence
  Synthetic
uucaucuuaaucacagggag

SEQ ID NO: 804848 - RNA, 20 nt, Artificial Sequence
  Synthetic
agagugacagagacagggag

SEQ ID NO: 804849 - RNA, 20 nt, Artificial Sequence
  Synthetic
aagggcauggauacagggag

SEQ ID NO: 804850 - RNA, 20 nt, Artificial Sequence
  Synthetic
aagugagcuggagcagggag

SEQ ID NO: 804851 - RNA, 20 nt, Artificial Sequence
  Synthetic
aggagguggugcagagggag

SEQ ID NO: 804852 - RNA, 20 nt, Artificial Sequence
  Synthetic
agaagaugguagagagggag

SEQ ID NO: 804853 - RNA, 20 nt, Artificial Sequence
  Synthetic
acagagacagggagagggag

SEQ ID NO: 804854 - RNA, 20 nt, Artificial Sequence
  Synthetic
ugcuugaacccaggagggag

SEQ ID NO: 804855 - RNA, 20 nt, Artificial Sequence
  Synthetic
cuacuagagggaggagggag

SEQ ID NO: 804856 - RNA, 20 nt, Artificial Sequence
  Synthetic
aggagaacgauaggagggag

SEQ ID NO: 804857 - RNA, 20 nt, Artificial Sequence
  Synthetic
aaaaagaaagagggagggag

SEQ ID NO: 804858 - RNA, 20 nt, Artificial Sequence
  Synthetic
uucccuuucuuaugagggag

SEQ ID NO: 804859 - RNA, 20 nt, Artificial Sequence
  Synthetic
ucuguggcaaugugagggag

SEQ ID NO: 804860 - RNA, 20 nt, Artificial Sequence
  Synthetic
caagaacacacaauagggag

SEQ ID NO: 804861 - RNA, 20 nt, Artificial Sequence
  Synthetic
agguuuacagaacuagggag

SEQ ID NO: 804862 - RNA, 20 nt, Artificial Sequence
  Synthetic
ucagaaauaggaguagggag

SEQ ID NO: 804863 - RNA, 20 nt, Artificial Sequence
  Synthetic
aacagcaaucuggccgggag

SEQ ID NO: 804864 - RNA, 20 nt, Artificial Sequence
  Synthetic
auagaaacauggcaggggag

SEQ ID NO: 804865 - RNA, 20 nt, Artificial Sequence
  Synthetic
agagggugguggcaggggag

SEQ ID NO: 804866 - RNA, 20 nt, Artificial Sequence
  Synthetic
agagggaggagggaggggag

SEQ ID NO: 804867 - RNA, 20 nt, Artificial Sequence
  Synthetic
uuuuaaaucacugaggggag

SEQ ID NO: 804868 - RNA, 20 nt, Artificial Sequence
  Synthetic
uguaucagugauuaggggag

SEQ ID NO: 804869 - RNA, 20 nt, Artificial Sequence
  Synthetic
auaguggaggagucggggag

SEQ ID NO: 804870 - RNA, 20 nt, Artificial Sequence
  Synthetic
aaauuuuggggaagggggag

SEQ ID NO: 804871 - RNA, 20 nt, Artificial Sequence
  Synthetic
cugugguggggucgggggag

SEQ ID NO: 804872 - RNA, 20 nt, Artificial Sequence
  Synthetic
cuguuguggggucgggggag

SEQ ID NO: 804873 - RNA, 20 nt, Artificial Sequence
  Synthetic
uuccacagaccuggggggag

SEQ ID NO: 804874 - RNA, 20 nt, Artificial Sequence
  Synthetic
uguguucaagguggggggag

SEQ ID NO: 804875 - RNA, 20 nt, Artificial Sequence
  Synthetic
cugucgugggguggggggag

SEQ ID NO: 804876 - RNA, 20 nt, Artificial Sequence
  Synthetic
cuguggugggguggggggag

SEQ ID NO: 804877 - RNA, 20 nt, Artificial Sequence
  Synthetic
cugcugugggguggggggag

SEQ ID NO: 804878 - RNA, 20 nt, Artificial Sequence
  Synthetic
cuguugugggguggggggag

SEQ ID NO: 804879 - RNA, 20 nt, Artificial Sequence
  Synthetic
aacacauggagaugggggag

SEQ ID NO: 804880 - RNA, 20 nt, Artificial Sequence
  Synthetic
auuaacuugauaugggggag

SEQ ID NO: 804881 - RNA, 20 nt, Artificial Sequence
  Synthetic
agugagagaaagugggggag

SEQ ID NO: 804882 - RNA, 20 nt, Artificial Sequence
  Synthetic
agggcuugggagugggggag

SEQ ID NO: 804883 - RNA, 20 nt, Artificial Sequence
  Synthetic
cucaagcuuaguguggggag

SEQ ID NO: 804884 - RNA, 20 nt, Artificial Sequence
  Synthetic
cuaacaaggguuaaugggag

SEQ ID NO: 804885 - RNA, 20 nt, Artificial Sequence
  Synthetic
acagaaauggaacaugggag

SEQ ID NO: 804886 - RNA, 20 nt, Artificial Sequence
  Synthetic
agauucauaaaccaugggag

SEQ ID NO: 804887 - RNA, 20 nt, Artificial Sequence
  Synthetic
ugaaugccagaucaugggag

SEQ ID NO: 804888 - RNA, 20 nt, Artificial Sequence
  Synthetic
uaauaacuuuuagaugggag

SEQ ID NO: 804889 - RNA, 20 nt, Artificial Sequence
  Synthetic
cucugguccuaugaugggag

SEQ ID NO: 804890 - RNA, 20 nt, Artificial Sequence
  Synthetic
cucugggcuugugaugggag

SEQ ID NO: 804891 - RNA, 20 nt, Artificial Sequence
  Synthetic
uacaaaaaauuaacugggag

SEQ ID NO: 804892 - RNA, 20 nt, Artificial Sequence
  Synthetic
aaauuucauaucccugggag

SEQ ID NO: 804893 - RNA, 20 nt, Artificial Sequence
  Synthetic
augcuugaccaagcugggag

SEQ ID NO: 804894 - RNA, 20 nt, Artificial Sequence
  Synthetic
aaaugaaauaucucugggag

SEQ ID NO: 804895 - RNA, 20 nt, Artificial Sequence
  Synthetic
ugucuuucagcuggugggag

SEQ ID NO: 804896 - RNA, 20 nt, Artificial Sequence
  Synthetic
uugaauacgaguggugggag

SEQ ID NO: 804897 - RNA, 20 nt, Artificial Sequence
  Synthetic
cagaguucagggcuugggag

SEQ ID NO: 804898 - RNA, 20 nt, Artificial Sequence
  Synthetic
acaccagaauaaguugggag

SEQ ID NO: 804899 - RNA, 20 nt, Artificial Sequence
  Synthetic
agggacaugagauuugggag

SEQ ID NO: 804900 - RNA, 20 nt, Artificial Sequence
  Synthetic
agagugcuuaucuuugggag

SEQ ID NO: 804901 - RNA, 20 nt, Artificial Sequence
  Synthetic
cuuugugguugguuugggag

SEQ ID NO: 804902 - RNA, 20 nt, Artificial Sequence
  Synthetic
cccacaguagauuuugggag

SEQ ID NO: 804903 - RNA, 20 nt, Artificial Sequence
  Synthetic
uuuaguaugucuuuugggag

SEQ ID NO: 804904 - RNA, 20 nt, Artificial Sequence
  Synthetic
uucaagaagauuuuugggag

SEQ ID NO: 804905 - RNA, 20 nt, Artificial Sequence
  Synthetic
uauuuuaaaguuaaauggag

SEQ ID NO: 804906 - RNA, 20 nt, Artificial Sequence
  Synthetic
cacauaagaucagaauggag

SEQ ID NO: 804907 - RNA, 20 nt, Artificial Sequence
  Synthetic
uuugaaaacucagaauggag

SEQ ID NO: 804908 - RNA, 20 nt, Artificial Sequence
  Synthetic
acagagagagaggaauggag

SEQ ID NO: 804909 - RNA, 20 nt, Artificial Sequence
  Synthetic
uccauaugaguggaauggag

SEQ ID NO: 804910 - RNA, 20 nt, Artificial Sequence
  Synthetic
cuucuauuguuaccauggag

SEQ ID NO: 804911 - RNA, 20 nt, Artificial Sequence
  Synthetic
uuucuucccuauucauggag

SEQ ID NO: 804912 - RNA, 20 nt, Artificial Sequence
  Synthetic
aaguuaccaaguucauggag

SEQ ID NO: 804913 - RNA, 20 nt, Artificial Sequence
  Synthetic
agugcuaaacaaagauggag

SEQ ID NO: 804914 - RNA, 20 nt, Artificial Sequence
  Synthetic
aauccagagauaggauggag

SEQ ID NO: 804915 - RNA, 20 nt, Artificial Sequence
  Synthetic
auauucagaggaugauggag

SEQ ID NO: 804916 - RNA, 20 nt, Artificial Sequence
  Synthetic
ccuuuugaacuaugauggag

SEQ ID NO: 804917 - RNA, 20 nt, Artificial Sequence
  Synthetic
agagaaagaugcugauggag

SEQ ID NO: 804918 - RNA, 20 nt, Artificial Sequence
  Synthetic
ccuaggagauucugauggag

SEQ ID NO: 804919 - RNA, 20 nt, Artificial Sequence
  Synthetic
aguggauuuuggugauggag

SEQ ID NO: 804920 - RNA, 20 nt, Artificial Sequence
  Synthetic
uuaaaggagcagauauggag

SEQ ID NO: 804921 - RNA, 20 nt, Artificial Sequence
  Synthetic
aagucacaauguguauggag

SEQ ID NO: 804922 - RNA, 20 nt, Artificial Sequence
  Synthetic
uguuguuagaaagacuggag

SEQ ID NO: 804923 - RNA, 20 nt, Artificial Sequence
  Synthetic
cuggggaagugagacuggag

SEQ ID NO: 804924 - RNA, 20 nt, Artificial Sequence
  Synthetic
cauugauucacauacuggag

SEQ ID NO: 804925 - RNA, 20 nt, Artificial Sequence
  Synthetic
cagcuuaacucagccuggag

SEQ ID NO: 804926 - RNA, 20 nt, Artificial Sequence
  Synthetic
cuccaaggagaguccuggag

SEQ ID NO: 804927 - RNA, 20 nt, Artificial Sequence
  Synthetic
aaagcagaaggaagcuggag

SEQ ID NO: 804928 - RNA, 20 nt, Artificial Sequence
  Synthetic
aggauuuccgccagcuggag

SEQ ID NO: 804929 - RNA, 20 nt, Artificial Sequence
  Synthetic
cucugucacccaggcuggag

SEQ ID NO: 804930 - RNA, 20 nt, Artificial Sequence
  Synthetic
uuuugucacccaggcuggag

SEQ ID NO: 804931 - RNA, 20 nt, Artificial Sequence
  Synthetic
cucugucgcccaggcuggag

SEQ ID NO: 804932 - RNA, 20 nt, Artificial Sequence
  Synthetic
acaguuccacauggcuggag

SEQ ID NO: 804933 - RNA, 20 nt, Artificial Sequence
  Synthetic
ccuuuuagccauggcuggag

SEQ ID NO: 804934 - RNA, 20 nt, Artificial Sequence
  Synthetic
ccuuuuauccauggcuggag

SEQ ID NO: 804935 - RNA, 20 nt, Artificial Sequence
  Synthetic
acaaaagauuaaugcuggag

SEQ ID NO: 804936 - RNA, 20 nt, Artificial Sequence
  Synthetic
uuuguuuggcuccucuggag

SEQ ID NO: 804937 - RNA, 20 nt, Artificial Sequence
  Synthetic
auccuagaagcagucuggag

SEQ ID NO: 804938 - RNA, 20 nt, Artificial Sequence
  Synthetic
caggcaaacagggucuggag

SEQ ID NO: 804939 - RNA, 20 nt, Artificial Sequence
  Synthetic
cuauacuuaagaaaguggag

SEQ ID NO: 804940 - RNA, 20 nt, Artificial Sequence
  Synthetic
uacuagagaagacaguggag

SEQ ID NO: 804941 - RNA, 20 nt, Artificial Sequence
  Synthetic
ucacccaggcuggaguggag

SEQ ID NO: 804942 - RNA, 20 nt, Artificial Sequence
  Synthetic
ucgcccaggcuggaguggag

SEQ ID NO: 804943 - RNA, 20 nt, Artificial Sequence
  Synthetic
ugggaaauuuuuucguggag

SEQ ID NO: 804944 - RNA, 20 nt, Artificial Sequence
  Synthetic
ugguugcuacaaagguggag

SEQ ID NO: 804945 - RNA, 20 nt, Artificial Sequence
  Synthetic
caggagggagaaagguggag

SEQ ID NO: 804946 - RNA, 20 nt, Artificial Sequence
  Synthetic
ugguucagacuaggguggag

SEQ ID NO: 804947 - RNA, 20 nt, Artificial Sequence
  Synthetic
augaaaccuccucuguggag

SEQ ID NO: 804948 - RNA, 20 nt, Artificial Sequence
  Synthetic
acuuaauucaauuuguggag

SEQ ID NO: 804949 - RNA, 20 nt, Artificial Sequence
  Synthetic
uuaauggugcguuuguggag

SEQ ID NO: 804950 - RNA, 20 nt, Artificial Sequence
  Synthetic
ucuguauugaaaaauuggag

SEQ ID NO: 804951 - RNA, 20 nt, Artificial Sequence
  Synthetic
ugagaagaauaaaauuggag

SEQ ID NO: 804952 - RNA, 20 nt, Artificial Sequence
  Synthetic
aacuuccuagagaauuggag

SEQ ID NO: 804953 - RNA, 20 nt, Artificial Sequence
  Synthetic
ucgcuagaacauaauuggag

SEQ ID NO: 804954 - RNA, 20 nt, Artificial Sequence
  Synthetic
uguaacuuggaagauuggag

SEQ ID NO: 804955 - RNA, 20 nt, Artificial Sequence
  Synthetic
uguguagaaauagauuggag

SEQ ID NO: 804956 - RNA, 20 nt, Artificial Sequence
  Synthetic
aauuggagaguagauuggag

SEQ ID NO: 804957 - RNA, 20 nt, Artificial Sequence
  Synthetic
uagcugguaaagacuuggag

SEQ ID NO: 804958 - RNA, 20 nt, Artificial Sequence
  Synthetic
cuccaggacucuccuuggag

SEQ ID NO: 804959 - RNA, 20 nt, Artificial Sequence
  Synthetic
ugagggaauucugcuuggag

SEQ ID NO: 804960 - RNA, 20 nt, Artificial Sequence
  Synthetic
auuaaaaaaacuucuuggag

SEQ ID NO: 804961 - RNA, 20 nt, Artificial Sequence
  Synthetic
aguagaaggugagguuggag

SEQ ID NO: 804962 - RNA, 20 nt, Artificial Sequence
  Synthetic
auauauuaaggaauuuggag

SEQ ID NO: 804963 - RNA, 20 nt, Artificial Sequence
  Synthetic
uauggaucuuacauuuggag

SEQ ID NO: 804964 - RNA, 20 nt, Artificial Sequence
  Synthetic
uuucaacaugagauuuggag

SEQ ID NO: 804965 - RNA, 20 nt, Artificial Sequence
  Synthetic
cgaaaagguacuauuuggag

SEQ ID NO: 804966 - RNA, 20 nt, Artificial Sequence
  Synthetic
cuggcuccuuuuauuuggag

SEQ ID NO: 804967 - RNA, 20 nt, Artificial Sequence
  Synthetic
uuguggggaugacuuuggag

SEQ ID NO: 804968 - RNA, 20 nt, Artificial Sequence
  Synthetic
aauaguucaugccuuuggag

SEQ ID NO: 804969 - RNA, 20 nt, Artificial Sequence
  Synthetic
auccaucaauagguuuggag

SEQ ID NO: 804970 - RNA, 20 nt, Artificial Sequence
  Synthetic
acccagcugccauuuuggag

SEQ ID NO: 804971 - RNA, 20 nt, Artificial Sequence
  Synthetic
caaagugccauauuuuggag

SEQ ID NO: 804972 - RNA, 20 nt, Artificial Sequence
  Synthetic
uuguugauucucuuuuggag

SEQ ID NO: 804973 - RNA, 20 nt, Artificial Sequence
  Synthetic
acuuuucuagauuuuuggag

SEQ ID NO: 804974 - RNA, 20 nt, Artificial Sequence
  Synthetic
ucagcuuugacuuuuuggag

SEQ ID NO: 804975 - RNA, 20 nt, Artificial Sequence
  Synthetic
ucuuuuaaauauaaaaugag

SEQ ID NO: 804976 - RNA, 20 nt, Artificial Sequence
  Synthetic
caguagaaaacagaaaugag

SEQ ID NO: 804977 - RNA, 20 nt, Artificial Sequence
  Synthetic
ccauaagguggauaaaugag

SEQ ID NO: 804978 - RNA, 20 nt, Artificial Sequence
  Synthetic
uuuccagauagguaaaugag

SEQ ID NO: 804979 - RNA, 20 nt, Artificial Sequence
  Synthetic
cuuucagugaaaacaaugag

SEQ ID NO: 804980 - RNA, 20 nt, Artificial Sequence
  Synthetic
agugccagccgaccaaugag

SEQ ID NO: 804981 - RNA, 20 nt, Artificial Sequence
  Synthetic
acaggggagaaggcaaugag

SEQ ID NO: 804982 - RNA, 20 nt, Artificial Sequence
  Synthetic
uaagcaagagaaucaaugag

SEQ ID NO: 804983 - RNA, 20 nt, Artificial Sequence
  Synthetic
augcacagaauaagaaugag

SEQ ID NO: 804984 - RNA, 20 nt, Artificial Sequence
  Synthetic
uguuacuuggagagaaugag

SEQ ID NO: 804985 - RNA, 20 nt, Artificial Sequence
  Synthetic
cacuggugggcaggaaugag

SEQ ID NO: 804986 - RNA, 20 nt, Artificial Sequence
  Synthetic
auauagcuaaagggaaugag

SEQ ID NO: 804987 - RNA, 20 nt, Artificial Sequence
  Synthetic
aguggauugagaugaaugag

SEQ ID NO: 804988 - RNA, 20 nt, Artificial Sequence
  Synthetic
auugaaaccuagugaaugag

SEQ ID NO: 804989 - RNA, 20 nt, Artificial Sequence
  Synthetic
cagaaagcaucuugaaugag

SEQ ID NO: 804990 - RNA, 20 nt, Artificial Sequence
  Synthetic
agugccgcaguaaacaugag

SEQ ID NO: 804991 - RNA, 20 nt, Artificial Sequence
  Synthetic
uaacugggagggaacaugag

SEQ ID NO: 804992 - RNA, 20 nt, Artificial Sequence
  Synthetic
ugaugauuuugacacaugag

SEQ ID NO: 804993 - RNA, 20 nt, Artificial Sequence
  Synthetic
aaacagaaaaaugacaugag

SEQ ID NO: 804994 - RNA, 20 nt, Artificial Sequence
  Synthetic
uuauuauuuuucaccaugag

SEQ ID NO: 804995 - RNA, 20 nt, Artificial Sequence
  Synthetic
caggcuaccaugcccaugag

SEQ ID NO: 804996 - RNA, 20 nt, Artificial Sequence
  Synthetic
cucuuuauucuuuccaugag

SEQ ID NO: 804997 - RNA, 20 nt, Artificial Sequence
  Synthetic
uuauccugaaugagcaugag

SEQ ID NO: 804998 - RNA, 20 nt, Artificial Sequence
  Synthetic
uuacauuauagaggcaugag

SEQ ID NO: 804999 - RNA, 20 nt, Artificial Sequence
  Synthetic
ucaggaaaacacaucaugag

SEQ ID NO: 805000 - RNA, 20 nt, Artificial Sequence
  Synthetic
auauugauuugcuucaugag

SEQ ID NO: 805001 - RNA, 20 nt, Artificial Sequence
  Synthetic
uaugauaaugacaagaugag

SEQ ID NO: 805002 - RNA, 20 nt, Artificial Sequence
  Synthetic
aaugcuuaaaggaagaugag

SEQ ID NO: 805003 - RNA, 20 nt, Artificial Sequence
  Synthetic
auaagagucuugaagaugag

SEQ ID NO: 805004 - RNA, 20 nt, Artificial Sequence
  Synthetic
cugugggaggcuaagaugag

SEQ ID NO: 805005 - RNA, 20 nt, Artificial Sequence
  Synthetic
acagagaaugagcagaugag

SEQ ID NO: 805006 - RNA, 20 nt, Artificial Sequence
  Synthetic
ugagaagaaggagagaugag

SEQ ID NO: 805007 - RNA, 20 nt, Artificial Sequence
  Synthetic
uaaacaaagcaggagaugag

SEQ ID NO: 805008 - RNA, 20 nt, Artificial Sequence
  Synthetic
aggauuagguaggagaugag

SEQ ID NO: 805009 - RNA, 20 nt, Artificial Sequence
  Synthetic
aucucagugaaaaggaugag

SEQ ID NO: 805010 - RNA, 20 nt, Artificial Sequence
  Synthetic
caaaacaaaaugaggaugag

SEQ ID NO: 805011 - RNA, 20 nt, Artificial Sequence
  Synthetic
cagacugcuucuaggaugag

SEQ ID NO: 805012 - RNA, 20 nt, Artificial Sequence
  Synthetic
aucuaggcccaagggaugag

SEQ ID NO: 805013 - RNA, 20 nt, Artificial Sequence
  Synthetic
ucagcagaucaauggaugag

SEQ ID NO: 805014 - RNA, 20 nt, Artificial Sequence
  Synthetic
uuuugcagagccaugaugag

SEQ ID NO: 805015 - RNA, 20 nt, Artificial Sequence
  Synthetic
cuagccuacaggaugaugag

SEQ ID NO: 805016 - RNA, 20 nt, Artificial Sequence
  Synthetic
uaaguagaugggaugaugag

SEQ ID NO: 805017 - RNA, 20 nt, Artificial Sequence
  Synthetic
ucucaacucucaaauaugag

SEQ ID NO: 805018 - RNA, 20 nt, Artificial Sequence
  Synthetic
caugugagaauccauaugag

SEQ ID NO: 805019 - RNA, 20 nt, Artificial Sequence
  Synthetic
cggaugugaaaggauaugag

SEQ ID NO: 805020 - RNA, 20 nt, Artificial Sequence
  Synthetic
cugaguguguaugauaugag

SEQ ID NO: 805021 - RNA, 20 nt, Artificial Sequence
  Synthetic
cuuguucuucaguauaugag

SEQ ID NO: 805022 - RNA, 20 nt, Artificial Sequence
  Synthetic
cucuggcacuucuguaugag

SEQ ID NO: 805023 - RNA, 20 nt, Artificial Sequence
  Synthetic
uccaucaguaauuguaugag

SEQ ID NO: 805024 - RNA, 20 nt, Artificial Sequence
  Synthetic
ugugauggaaacauuaugag

SEQ ID NO: 805025 - RNA, 20 nt, Artificial Sequence
  Synthetic
uaacaaugccuccuuaugag

SEQ ID NO: 805026 - RNA, 20 nt, Artificial Sequence
  Synthetic
cagaucaaacugcuuaugag

SEQ ID NO: 805027 - RNA, 20 nt, Artificial Sequence
  Synthetic
auaaguaaguaaguuaugag

SEQ ID NO: 805028 - RNA, 20 nt, Artificial Sequence
  Synthetic
aauaaccagcauguuaugag

SEQ ID NO: 805029 - RNA, 20 nt, Artificial Sequence
  Synthetic
aguacagaggaaaaacugag

SEQ ID NO: 805030 - RNA, 20 nt, Artificial Sequence
  Synthetic
uuuccuacuaaugaacugag

SEQ ID NO: 805031 - RNA, 20 nt, Artificial Sequence
  Synthetic
aacagauacauugaacugag

SEQ ID NO: 805032 - RNA, 20 nt, Artificial Sequence
  Synthetic
aagguugauaacacacugag

SEQ ID NO: 805033 - RNA, 20 nt, Artificial Sequence
  Synthetic
aguccauuuuaaggacugag

SEQ ID NO: 805034 - RNA, 20 nt, Artificial Sequence
  Synthetic
cacaaaaagacuggacugag

SEQ ID NO: 805035 - RNA, 20 nt, Artificial Sequence
  Synthetic
uaguacaucucaauacugag

SEQ ID NO: 805036 - RNA, 20 nt, Artificial Sequence
  Synthetic
acagagauuuaucuacugag

SEQ ID NO: 805037 - RNA, 20 nt, Artificial Sequence
  Synthetic
uaauacccugacacccugag

SEQ ID NO: 805038 - RNA, 20 nt, Artificial Sequence
  Synthetic
cuaaccccccauccccugag

SEQ ID NO: 805039 - RNA, 20 nt, Artificial Sequence
  Synthetic
uaacaaucagauccccugag

SEQ ID NO: 805040 - RNA, 20 nt, Artificial Sequence
  Synthetic
ucaagguaugcuccccugag

SEQ ID NO: 805041 - RNA, 20 nt, Artificial Sequence
  Synthetic
acacauuuuaaggcccugag

SEQ ID NO: 805042 - RNA, 20 nt, Artificial Sequence
  Synthetic
uaaugggguuucugccugag

SEQ ID NO: 805043 - RNA, 20 nt, Artificial Sequence
  Synthetic
cggaaugaagugcuccugag

SEQ ID NO: 805044 - RNA, 20 nt, Artificial Sequence
  Synthetic
aagaggaaaagagagcugag

SEQ ID NO: 805045 - RNA, 20 nt, Artificial Sequence
  Synthetic
uccagaggcacugagcugag

SEQ ID NO: 805046 - RNA, 20 nt, Artificial Sequence
  Synthetic
aauuacaaaauugagcugag

SEQ ID NO: 805047 - RNA, 20 nt, Artificial Sequence
  Synthetic
uuaaaagagauuuagcugag

SEQ ID NO: 805048 - RNA, 20 nt, Artificial Sequence
  Synthetic
ccauguggagccaggcugag

SEQ ID NO: 805049 - RNA, 20 nt, Artificial Sequence
  Synthetic
cuaaccaucccagggcugag

SEQ ID NO: 805050 - RNA, 20 nt, Artificial Sequence
  Synthetic
cacagcuaacgggggcugag

SEQ ID NO: 805051 - RNA, 20 nt, Artificial Sequence
  Synthetic
cauuaccuucacuggcugag

SEQ ID NO: 805052 - RNA, 20 nt, Artificial Sequence
  Synthetic
ugagggcuuaaauugcugag

SEQ ID NO: 805053 - RNA, 20 nt, Artificial Sequence
  Synthetic
augguaauaguauugcugag

SEQ ID NO: 805054 - RNA, 20 nt, Artificial Sequence
  Synthetic
uucccaaaggcaaaucugag

SEQ ID NO: 805055 - RNA, 20 nt, Artificial Sequence
  Synthetic
uucuaaggucagaaucugag

SEQ ID NO: 805056 - RNA, 20 nt, Artificial Sequence
  Synthetic
auucucauaaugaaucugag

SEQ ID NO: 805057 - RNA, 20 nt, Artificial Sequence
  Synthetic
ucuugccuagauaaucugag

SEQ ID NO: 805058 - RNA, 20 nt, Artificial Sequence
  Synthetic
ugggaaagacaagaucugag

SEQ ID NO: 805059 - RNA, 20 nt, Artificial Sequence
  Synthetic
aaaacacauuauuaucugag

SEQ ID NO: 805060 - RNA, 20 nt, Artificial Sequence
  Synthetic
cccaagcccugaacucugag

SEQ ID NO: 805061 - RNA, 20 nt, Artificial Sequence
  Synthetic
uggucaugccuaacucugag

SEQ ID NO: 805062 - RNA, 20 nt, Artificial Sequence
  Synthetic
uagaagaucugagcucugag

SEQ ID NO: 805063 - RNA, 20 nt, Artificial Sequence
  Synthetic
uaaaguguagucagucugag

SEQ ID NO: 805064 - RNA, 20 nt, Artificial Sequence
  Synthetic
ucauuaacuucuggucugag

SEQ ID NO: 805065 - RNA, 20 nt, Artificial Sequence
  Synthetic
ccuaugaggugcugucugag

SEQ ID NO: 805066 - RNA, 20 nt, Artificial Sequence
  Synthetic
uaauauaauuugugucugag

SEQ ID NO: 805067 - RNA, 20 nt, Artificial Sequence
  Synthetic
aaguguacaaaaauucugag

SEQ ID NO: 805068 - RNA, 20 nt, Artificial Sequence
  Synthetic
cucuuuauccucauucugag

SEQ ID NO: 805069 - RNA, 20 nt, Artificial Sequence
  Synthetic
cauuuagauauauuucugag

SEQ ID NO: 805070 - RNA, 20 nt, Artificial Sequence
  Synthetic
uucucuccuauauuucugag

SEQ ID NO: 805071 - RNA, 20 nt, Artificial Sequence
  Synthetic
cauauaauauucuuucugag

SEQ ID NO: 805072 - RNA, 20 nt, Artificial Sequence
  Synthetic
uaguguccacauuuucugag

SEQ ID NO: 805073 - RNA, 20 nt, Artificial Sequence
  Synthetic
auguacauucugaaagugag

SEQ ID NO: 805074 - RNA, 20 nt, Artificial Sequence
  Synthetic
uacaggcugucacaagugag

SEQ ID NO: 805075 - RNA, 20 nt, Artificial Sequence
  Synthetic
cuuugaaaaauccaagugag

SEQ ID NO: 805076 - RNA, 20 nt, Artificial Sequence
  Synthetic
caaacauucauugaagugag

SEQ ID NO: 805077 - RNA, 20 nt, Artificial Sequence
  Synthetic
uuccacgcauuugaagugag

SEQ ID NO: 805078 - RNA, 20 nt, Artificial Sequence
  Synthetic
ugagaauggagcuaagugag

SEQ ID NO: 805079 - RNA, 20 nt, Artificial Sequence
  Synthetic
cucuucaucuacacagugag

SEQ ID NO: 805080 - RNA, 20 nt, Artificial Sequence
  Synthetic
uaccacagacauacagugag

SEQ ID NO: 805081 - RNA, 20 nt, Artificial Sequence
  Synthetic
caugggagggacccagugag

SEQ ID NO: 805082 - RNA, 20 nt, Artificial Sequence
  Synthetic
cucaaaauuaucccagugag

SEQ ID NO: 805083 - RNA, 20 nt, Artificial Sequence
  Synthetic
aaacuacacacagcagugag

SEQ ID NO: 805084 - RNA, 20 nt, Artificial Sequence
  Synthetic
auaaaacaaauagcagugag

SEQ ID NO: 805085 - RNA, 20 nt, Artificial Sequence
  Synthetic
ucaauuggguaugcagugag

SEQ ID NO: 805086 - RNA, 20 nt, Artificial Sequence
  Synthetic
augagacaaaagucagugag

SEQ ID NO: 805087 - RNA, 20 nt, Artificial Sequence
  Synthetic
aacaaagaaucuucagugag

SEQ ID NO: 805088 - RNA, 20 nt, Artificial Sequence
  Synthetic
aguugaauaugaagagugag

SEQ ID NO: 805089 - RNA, 20 nt, Artificial Sequence
  Synthetic
aggcauagcugaggagugag

SEQ ID NO: 805090 - RNA, 20 nt, Artificial Sequence
  Synthetic
uaaaauaaaaauggagugag

SEQ ID NO: 805091 - RNA, 20 nt, Artificial Sequence
  Synthetic
ucccagcagacgugagugag

SEQ ID NO: 805092 - RNA, 20 nt, Artificial Sequence
  Synthetic
ugggugagucggugagugag

SEQ ID NO: 805093 - RNA, 20 nt, Artificial Sequence
  Synthetic
aauccaaauuuacuagugag

SEQ ID NO: 805094 - RNA, 20 nt, Artificial Sequence
  Synthetic
aagaaguagauuguagugag

SEQ ID NO: 805095 - RNA, 20 nt, Artificial Sequence
  Synthetic
ugcuaacucucauuagugag

SEQ ID NO: 805096 - RNA, 20 nt, Artificial Sequence
  Synthetic
agauaauuuuuugucgugag

SEQ ID NO: 805097 - RNA, 20 nt, Artificial Sequence
  Synthetic
cuuugggaggccaaggugag

SEQ ID NO: 805098 - RNA, 20 nt, Artificial Sequence
  Synthetic
agccugaggaauaaggugag

SEQ ID NO: 805099 - RNA, 20 nt, Artificial Sequence
  Synthetic
agucugagauuuaaggugag

SEQ ID NO: 805100 - RNA, 20 nt, Artificial Sequence
  Synthetic
aaucuaguugaagaggugag

SEQ ID NO: 805101 - RNA, 20 nt, Artificial Sequence
  Synthetic
aaaucuuugcaugaggugag

SEQ ID NO: 805102 - RNA, 20 nt, Artificial Sequence
  Synthetic
aucauuucuugguaggugag

SEQ ID NO: 805103 - RNA, 20 nt, Artificial Sequence
  Synthetic
aaaaaggacaccagggugag

SEQ ID NO: 805104 - RNA, 20 nt, Artificial Sequence
  Synthetic
ugguugugguauagggugag

SEQ ID NO: 805105 - RNA, 20 nt, Artificial Sequence
  Synthetic
ugggaaggguagggggugag

SEQ ID NO: 805106 - RNA, 20 nt, Artificial Sequence
  Synthetic
auaaugauguuuggggugag

SEQ ID NO: 805107 - RNA, 20 nt, Artificial Sequence
  Synthetic
uggagguggggccuggugag

SEQ ID NO: 805108 - RNA, 20 nt, Artificial Sequence
  Synthetic
uaucagaggugaguggugag

SEQ ID NO: 805109 - RNA, 20 nt, Artificial Sequence
  Synthetic
cauggcaugauuuuggugag

SEQ ID NO: 805110 - RNA, 20 nt, Artificial Sequence
  Synthetic
acuauuuucacaaaugugag

SEQ ID NO: 805111 - RNA, 20 nt, Artificial Sequence
  Synthetic
auuaauguuagaaaugugag

SEQ ID NO: 805112 - RNA, 20 nt, Artificial Sequence
  Synthetic
auuauuuuuauaaaugugag

SEQ ID NO: 805113 - RNA, 20 nt, Artificial Sequence
  Synthetic
ugugaccaauugaaugugag

SEQ ID NO: 805114 - RNA, 20 nt, Artificial Sequence
  Synthetic
agaaauggcucuaaugugag

SEQ ID NO: 805115 - RNA, 20 nt, Artificial Sequence
  Synthetic
uugcauggauuuaaugugag

SEQ ID NO: 805116 - RNA, 20 nt, Artificial Sequence
  Synthetic
ucagggccagugcaugugag

SEQ ID NO: 805117 - RNA, 20 nt, Artificial Sequence
  Synthetic
acaaauaaauaucaugugag

SEQ ID NO: 805118 - RNA, 20 nt, Artificial Sequence
  Synthetic
aauauuuaaaguuaugugag

SEQ ID NO: 805119 - RNA, 20 nt, Artificial Sequence
  Synthetic
aucguaauagagacugugag

SEQ ID NO: 805120 - RNA, 20 nt, Artificial Sequence
  Synthetic
ucaggauuaacaccugugag

SEQ ID NO: 805121 - RNA, 20 nt, Artificial Sequence
  Synthetic
augagucccuccccugugag

SEQ ID NO: 805122 - RNA, 20 nt, Artificial Sequence
  Synthetic
uuuauccuucaagcugugag

SEQ ID NO: 805123 - RNA, 20 nt, Artificial Sequence
  Synthetic
cauuuuauugaggcugugag

SEQ ID NO: 805124 - RNA, 20 nt, Artificial Sequence
  Synthetic
uacuugaggaaaagugugag

SEQ ID NO: 805125 - RNA, 20 nt, Artificial Sequence
  Synthetic
cacauacacauaugugugag

SEQ ID NO: 805126 - RNA, 20 nt, Artificial Sequence
  Synthetic
auuaaacaaaugugugugag

SEQ ID NO: 805127 - RNA, 20 nt, Artificial Sequence
  Synthetic
cuuuauauuguacuugugag

SEQ ID NO: 805128 - RNA, 20 nt, Artificial Sequence
  Synthetic
cugaauaccuuacuugugag

SEQ ID NO: 805129 - RNA, 20 nt, Artificial Sequence
  Synthetic
caggcugacugucuugugag

SEQ ID NO: 805130 - RNA, 20 nt, Artificial Sequence
  Synthetic
cacccuuccuaaguugugag

SEQ ID NO: 805131 - RNA, 20 nt, Artificial Sequence
  Synthetic
auaggguauucaaaauugag

SEQ ID NO: 805132 - RNA, 20 nt, Artificial Sequence
  Synthetic
auaaauguugggaaauugag

SEQ ID NO: 805133 - RNA, 20 nt, Artificial Sequence
  Synthetic
uucucaaaguguaaauugag

SEQ ID NO: 805134 - RNA, 20 nt, Artificial Sequence
  Synthetic
aaaaaaaguauccaauugag

SEQ ID NO: 805135 - RNA, 20 nt, Artificial Sequence
  Synthetic
ugaccuugacugacauugag

SEQ ID NO: 805136 - RNA, 20 nt, Artificial Sequence
  Synthetic
uuuucuguuuuaggauugag

SEQ ID NO: 805137 - RNA, 20 nt, Artificial Sequence
  Synthetic
uuuauaauggggggauugag

SEQ ID NO: 805138 - RNA, 20 nt, Artificial Sequence
  Synthetic
cugugaucgggaugauugag

SEQ ID NO: 805139 - RNA, 20 nt, Artificial Sequence
  Synthetic
augaggacucaaauauugag

SEQ ID NO: 805140 - RNA, 20 nt, Artificial Sequence
  Synthetic
aaagggauggaaauauugag

SEQ ID NO: 805141 - RNA, 20 nt, Artificial Sequence
  Synthetic
auauucuuaaugcuauugag

SEQ ID NO: 805142 - RNA, 20 nt, Artificial Sequence
  Synthetic
auguauucgaauguauugag

SEQ ID NO: 805143 - RNA, 20 nt, Artificial Sequence
  Synthetic
cagugguucucaaacuugag

SEQ ID NO: 805144 - RNA, 20 nt, Artificial Sequence
  Synthetic
aaaaaagaaaacaacuugag

SEQ ID NO: 805145 - RNA, 20 nt, Artificial Sequence
  Synthetic
caaagaaaaugauacuugag

SEQ ID NO: 805146 - RNA, 20 nt, Artificial Sequence
  Synthetic
auuaaguuaugcaccuugag

SEQ ID NO: 805147 - RNA, 20 nt, Artificial Sequence
  Synthetic
acuggcaagucuaccuugag

SEQ ID NO: 805148 - RNA, 20 nt, Artificial Sequence
  Synthetic
cucccauuccaugccuugag

SEQ ID NO: 805149 - RNA, 20 nt, Artificial Sequence
  Synthetic
agucugugguuguccuugag

SEQ ID NO: 805150 - RNA, 20 nt, Artificial Sequence
  Synthetic
uaaaaaugagaaagcuugag

SEQ ID NO: 805151 - RNA, 20 nt, Artificial Sequence
  Synthetic
ugaaaggagcccagcuugag

SEQ ID NO: 805152 - RNA, 20 nt, Artificial Sequence
  Synthetic
aaagagggauaaggcuugag

SEQ ID NO: 805153 - RNA, 20 nt, Artificial Sequence
  Synthetic
auaaagaauaaaugcuugag

SEQ ID NO: 805154 - RNA, 20 nt, Artificial Sequence
  Synthetic
acaaagaauaauugcuugag

SEQ ID NO: 805155 - RNA, 20 nt, Artificial Sequence
  Synthetic
aaagaacucuguaucuugag

SEQ ID NO: 805156 - RNA, 20 nt, Artificial Sequence
  Synthetic
aaaguuaauuugcucuugag

SEQ ID NO: 805157 - RNA, 20 nt, Artificial Sequence
  Synthetic
uuauucauauacuucuugag

SEQ ID NO: 805158 - RNA, 20 nt, Artificial Sequence
  Synthetic
auuguggcagccaaguugag

SEQ ID NO: 805159 - RNA, 20 nt, Artificial Sequence
  Synthetic
uggacuaagcagcaguugag

SEQ ID NO: 805160 - RNA, 20 nt, Artificial Sequence
  Synthetic
uaaguuucugagcaguugag

SEQ ID NO: 805161 - RNA, 20 nt, Artificial Sequence
  Synthetic
ucugagaaaagucaguugag

SEQ ID NO: 805162 - RNA, 20 nt, Artificial Sequence
  Synthetic
ucaguuuccauguaguugag

SEQ ID NO: 805163 - RNA, 20 nt, Artificial Sequence
  Synthetic
cucuuuuauuuuccguugag

SEQ ID NO: 805164 - RNA, 20 nt, Artificial Sequence
  Synthetic
cugagaaguccaagguugag

SEQ ID NO: 805165 - RNA, 20 nt, Artificial Sequence
  Synthetic
aggguaguggggggguugag

SEQ ID NO: 805166 - RNA, 20 nt, Artificial Sequence
  Synthetic
aaaggcauagagugguugag

SEQ ID NO: 805167 - RNA, 20 nt, Artificial Sequence
  Synthetic
uaaacaauggcaauguugag

SEQ ID NO: 805168 - RNA, 20 nt, Artificial Sequence
  Synthetic
uacccuagaggguuguugag

SEQ ID NO: 805169 - RNA, 20 nt, Artificial Sequence
  Synthetic
auaaagcuuucaaauuugag

SEQ ID NO: 805170 - RNA, 20 nt, Artificial Sequence
  Synthetic
auuuaauaaaccaauuugag

SEQ ID NO: 805171 - RNA, 20 nt, Artificial Sequence
  Synthetic
uguaaucccagcaauuugag

SEQ ID NO: 805172 - RNA, 20 nt, Artificial Sequence
  Synthetic
uuucaacauaggaauuugag

SEQ ID NO: 805173 - RNA, 20 nt, Artificial Sequence
  Synthetic
ucaguuuacuuuaauuugag

SEQ ID NO: 805174 - RNA, 20 nt, Artificial Sequence
  Synthetic
augugaugaugacauuugag

SEQ ID NO: 805175 - RNA, 20 nt, Artificial Sequence
  Synthetic
caauaaaaggugcauuugag

SEQ ID NO: 805176 - RNA, 20 nt, Artificial Sequence
  Synthetic
aauucaaaaugagauuugag

SEQ ID NO: 805177 - RNA, 20 nt, Artificial Sequence
  Synthetic
auuuccacuugagauuugag

SEQ ID NO: 805178 - RNA, 20 nt, Artificial Sequence
  Synthetic
uaauguacacuugauuugag

SEQ ID NO: 805179 - RNA, 20 nt, Artificial Sequence
  Synthetic
aguauucagguugauuugag

SEQ ID NO: 805180 - RNA, 20 nt, Artificial Sequence
  Synthetic
auucuaagcagcuauuugag

SEQ ID NO: 805181 - RNA, 20 nt, Artificial Sequence
  Synthetic
ugggcacaacaguauuugag

SEQ ID NO: 805182 - RNA, 20 nt, Artificial Sequence
  Synthetic
ucaccugcauaaacuuugag

SEQ ID NO: 805183 - RNA, 20 nt, Artificial Sequence
  Synthetic
augaucuauccaacuuugag

SEQ ID NO: 805184 - RNA, 20 nt, Artificial Sequence
  Synthetic
uguaaucccagcacuuugag

SEQ ID NO: 805185 - RNA, 20 nt, Artificial Sequence
  Synthetic
acuucccuguuuacuuugag

SEQ ID NO: 805186 - RNA, 20 nt, Artificial Sequence
  Synthetic
acauuauuucugccuuugag

SEQ ID NO: 805187 - RNA, 20 nt, Artificial Sequence
  Synthetic
ucuuuuugugugccuuugag

SEQ ID NO: 805188 - RNA, 20 nt, Artificial Sequence
  Synthetic
aaaacuagaauuccuuugag

SEQ ID NO: 805189 - RNA, 20 nt, Artificial Sequence
  Synthetic
agaacagaaauggcuuugag

SEQ ID NO: 805190 - RNA, 20 nt, Artificial Sequence
  Synthetic
auugauccuuaaaguuugag

SEQ ID NO: 805191 - RNA, 20 nt, Artificial Sequence
  Synthetic
accuuccucagcaguuugag

SEQ ID NO: 805192 - RNA, 20 nt, Artificial Sequence
  Synthetic
uuuccaugugcuaguuugag

SEQ ID NO: 805193 - RNA, 20 nt, Artificial Sequence
  Synthetic
aaagugacagaauguuugag

SEQ ID NO: 805194 - RNA, 20 nt, Artificial Sequence
  Synthetic
uugaagccuuccauuuugag

SEQ ID NO: 805195 - RNA, 20 nt, Artificial Sequence
  Synthetic
caugggaaagugauuuugag

SEQ ID NO: 805196 - RNA, 20 nt, Artificial Sequence
  Synthetic
aaauucagcacuauuuugag

SEQ ID NO: 805197 - RNA, 20 nt, Artificial Sequence
  Synthetic
uagcuuguaccacuuuugag

SEQ ID NO: 805198 - RNA, 20 nt, Artificial Sequence
  Synthetic
caggcugacucucuuuugag

SEQ ID NO: 805199 - RNA, 20 nt, Artificial Sequence
  Synthetic
auauugcgaauauuuuugag

SEQ ID NO: 805200 - RNA, 20 nt, Artificial Sequence
  Synthetic
uuaccaugauguuuuuugag

SEQ ID NO: 805201 - RNA, 20 nt, Artificial Sequence
  Synthetic
uuuuuuuuuuuuuuuuugag

SEQ ID NO: 805202 - RNA, 20 nt, Artificial Sequence
  Synthetic
aguaccauguaucaaaauag

SEQ ID NO: 805203 - RNA, 20 nt, Artificial Sequence
  Synthetic
augaagauuaaauaaaauag

SEQ ID NO: 805204 - RNA, 20 nt, Artificial Sequence
  Synthetic
cacuuaaggcuauaaaauag

SEQ ID NO: 805205 - RNA, 20 nt, Artificial Sequence
  Synthetic
aagcuuuuacaguaaaauag

SEQ ID NO: 805206 - RNA, 20 nt, Artificial Sequence
  Synthetic
uuucuuuacuaguaaaauag

SEQ ID NO: 805207 - RNA, 20 nt, Artificial Sequence
  Synthetic
aaugaaaugauguaaaauag

SEQ ID NO: 805208 - RNA, 20 nt, Artificial Sequence
  Synthetic
caaguaguagaaacaaauag

SEQ ID NO: 805209 - RNA, 20 nt, Artificial Sequence
  Synthetic
aagaaaauguaaacaaauag

SEQ ID NO: 805210 - RNA, 20 nt, Artificial Sequence
  Synthetic
cuuaaacauaccccaaauag

SEQ ID NO: 805211 - RNA, 20 nt, Artificial Sequence
  Synthetic
uaaagucuuaagccaaauag

SEQ ID NO: 805212 - RNA, 20 nt, Artificial Sequence
  Synthetic
agugauugugagccaaauag

SEQ ID NO: 805213 - RNA, 20 nt, Artificial Sequence
  Synthetic
aaagaagagacaucaaauag

SEQ ID NO: 805214 - RNA, 20 nt, Artificial Sequence
  Synthetic
accccugcacauucaaauag

SEQ ID NO: 805215 - RNA, 20 nt, Artificial Sequence
  Synthetic
ucagacauaaacagaaauag

SEQ ID NO: 805216 - RNA, 20 nt, Artificial Sequence
  Synthetic
aaggaaauauccagaaauag

SEQ ID NO: 805217 - RNA, 20 nt, Artificial Sequence
  Synthetic
agauaaauacagggaaauag

SEQ ID NO: 805218 - RNA, 20 nt, Artificial Sequence
  Synthetic
agguguggauguggaaauag

SEQ ID NO: 805219 - RNA, 20 nt, Artificial Sequence
  Synthetic
aaacacacuaacugaaauag

SEQ ID NO: 805220 - RNA, 20 nt, Artificial Sequence
  Synthetic
uuuucaucccacugaaauag

SEQ ID NO: 805221 - RNA, 20 nt, Artificial Sequence
  Synthetic
cuauaauuuaaaauaaauag

SEQ ID NO: 805222 - RNA, 20 nt, Artificial Sequence
  Synthetic
aauaggcacucaauaaauag

SEQ ID NO: 805223 - RNA, 20 nt, Artificial Sequence
  Synthetic
cacuuuuuauuuauaaauag

SEQ ID NO: 805224 - RNA, 20 nt, Artificial Sequence
  Synthetic
ccuuagugauuucuaaauag

SEQ ID NO: 805225 - RNA, 20 nt, Artificial Sequence
  Synthetic
caggucugguuucuaaauag

SEQ ID NO: 805226 - RNA, 20 nt, Artificial Sequence
  Synthetic
ccagcuguagcuuuaaauag

SEQ ID NO: 805227 - RNA, 20 nt, Artificial Sequence
  Synthetic
auuuuugauuuuuuaaauag

SEQ ID NO: 805228 - RNA, 20 nt, Artificial Sequence
  Synthetic
uuucucaucauaaacaauag

SEQ ID NO: 805229 - RNA, 20 nt, Artificial Sequence
  Synthetic
cagauggcaaucaacaauag

SEQ ID NO: 805230 - RNA, 20 nt, Artificial Sequence
  Synthetic
cuuaguuuacauaacaauag

SEQ ID NO: 805231 - RNA, 20 nt, Artificial Sequence
  Synthetic
auuauuaauacuaacaauag

SEQ ID NO: 805232 - RNA, 20 nt, Artificial Sequence
  Synthetic
cugcuuuugauccacaauag

SEQ ID NO: 805233 - RNA, 20 nt, Artificial Sequence
  Synthetic
auucacaauacuaccaauag

SEQ ID NO: 805234 - RNA, 20 nt, Artificial Sequence
  Synthetic
auaaggcauauacccaauag

SEQ ID NO: 805235 - RNA, 20 nt, Artificial Sequence
  Synthetic
auacuuacaggcuccaauag

SEQ ID NO: 805236 - RNA, 20 nt, Artificial Sequence
  Synthetic
acaaaggaagacagcaauag

SEQ ID NO: 805237 - RNA, 20 nt, Artificial Sequence
  Synthetic
ucaauuauaaugcucaauag

SEQ ID NO: 805238 - RNA, 20 nt, Artificial Sequence
  Synthetic
caggcccccauugucaauag

SEQ ID NO: 805239 - RNA, 20 nt, Artificial Sequence
  Synthetic
aauaggaaacauuucaauag

SEQ ID NO: 805240 - RNA, 20 nt, Artificial Sequence
  Synthetic
uuuaacuagugaaagaauag

SEQ ID NO: 805241 - RNA, 20 nt, Artificial Sequence
  Synthetic
caaauaaaaaacaagaauag

SEQ ID NO: 805242 - RNA, 20 nt, Artificial Sequence
  Synthetic
aggagggucaggaagaauag

SEQ ID NO: 805243 - RNA, 20 nt, Artificial Sequence
  Synthetic
uuuuucaaaacucagaauag

SEQ ID NO: 805244 - RNA, 20 nt, Artificial Sequence
  Synthetic
ucuucugaaauagagaauag

SEQ ID NO: 805245 - RNA, 20 nt, Artificial Sequence
  Synthetic
ugagucaagguagagaauag

SEQ ID NO: 805246 - RNA, 20 nt, Artificial Sequence
  Synthetic
aguaaauaagaggagaauag

SEQ ID NO: 805247 - RNA, 20 nt, Artificial Sequence
  Synthetic
cuucacuaaaaugagaauag

SEQ ID NO: 805248 - RNA, 20 nt, Artificial Sequence
  Synthetic
cuugcccccggaaggaauag

SEQ ID NO: 805249 - RNA, 20 nt, Artificial Sequence
  Synthetic
uaauaugcauuaaggaauag

SEQ ID NO: 805250 - RNA, 20 nt, Artificial Sequence
  Synthetic
uaugagaaaacugggaauag

SEQ ID NO: 805251 - RNA, 20 nt, Artificial Sequence
  Synthetic
aguuacuuuacuuggaauag

SEQ ID NO: 805252 - RNA, 20 nt, Artificial Sequence
  Synthetic
uacagacacaugcugaauag

SEQ ID NO: 805253 - RNA, 20 nt, Artificial Sequence
  Synthetic
uucucuugcuugcugaauag

SEQ ID NO: 805254 - RNA, 20 nt, Artificial Sequence
  Synthetic
uuugacauaucucugaauag

SEQ ID NO: 805255 - RNA, 20 nt, Artificial Sequence
  Synthetic
uuuuacucggcagugaauag

SEQ ID NO: 805256 - RNA, 20 nt, Artificial Sequence
  Synthetic
cacauaaacauugugaauag

SEQ ID NO: 805257 - RNA, 20 nt, Artificial Sequence
  Synthetic
aacaacuccaucuugaauag

SEQ ID NO: 805258 - RNA, 20 nt, Artificial Sequence
  Synthetic
agggcaucagaaaauaauag

SEQ ID NO: 805259 - RNA, 20 nt, Artificial Sequence
  Synthetic
cucaaaaguucaaauaauag

SEQ ID NO: 805260 - RNA, 20 nt, Artificial Sequence
  Synthetic
agaugcccauacaauaauag

SEQ ID NO: 805261 - RNA, 20 nt, Artificial Sequence
  Synthetic
agacagcaaugcaauaauag

SEQ ID NO: 805262 - RNA, 20 nt, Artificial Sequence
  Synthetic
aaauauuaguaauauaauag

SEQ ID NO: 805263 - RNA, 20 nt, Artificial Sequence
  Synthetic
uuauuauccccauauaauag

SEQ ID NO: 805264 - RNA, 20 nt, Artificial Sequence
  Synthetic
ucugaaugccacuauaauag

SEQ ID NO: 805265 - RNA, 20 nt, Artificial Sequence
  Synthetic
agagugauuaguuauaauag

SEQ ID NO: 805266 - RNA, 20 nt, Artificial Sequence
  Synthetic
augguaguauuuuauaauag

SEQ ID NO: 805267 - RNA, 20 nt, Artificial Sequence
  Synthetic
aauccuccaaaaccuaauag

SEQ ID NO: 805268 - RNA, 20 nt, Artificial Sequence
  Synthetic
cuaucccuuccuuguaauag

SEQ ID NO: 805269 - RNA, 20 nt, Artificial Sequence
  Synthetic
cccaaaagaggaauuaauag

SEQ ID NO: 805270 - RNA, 20 nt, Artificial Sequence
  Synthetic
aaacucuucuuccuuaauag

SEQ ID NO: 805271 - RNA, 20 nt, Artificial Sequence
  Synthetic
augaaguaguauguuaauag

SEQ ID NO: 805272 - RNA, 20 nt, Artificial Sequence
  Synthetic
auguugaugcuauuuaauag

SEQ ID NO: 805273 - RNA, 20 nt, Artificial Sequence
  Synthetic
caauaaaagcuuuuuaauag

SEQ ID NO: 805274 - RNA, 20 nt, Artificial Sequence
  Synthetic
caggaagauuaauaacauag

SEQ ID NO: 805275 - RNA, 20 nt, Artificial Sequence
  Synthetic
uugcucuucugcuaacauag

SEQ ID NO: 805276 - RNA, 20 nt, Artificial Sequence
  Synthetic
uacaggaaauucuaacauag

SEQ ID NO: 805277 - RNA, 20 nt, Artificial Sequence
  Synthetic
auauaaccaaagccacauag

SEQ ID NO: 805278 - RNA, 20 nt, Artificial Sequence
  Synthetic
cauauaucacuccuacauag

SEQ ID NO: 805279 - RNA, 20 nt, Artificial Sequence
  Synthetic
uaguuugacacucuacauag

SEQ ID NO: 805280 - RNA, 20 nt, Artificial Sequence
  Synthetic
ucuauguggagucuacauag

SEQ ID NO: 805281 - RNA, 20 nt, Artificial Sequence
  Synthetic
ugaauuaaaagacaccauag

SEQ ID NO: 805282 - RNA, 20 nt, Artificial Sequence
  Synthetic
cucauuuacuuuacccauag

SEQ ID NO: 805283 - RNA, 20 nt, Artificial Sequence
  Synthetic
uagguacacaugugccauag

SEQ ID NO: 805284 - RNA, 20 nt, Artificial Sequence
  Synthetic
aagccuaguuugugccauag

SEQ ID NO: 805285 - RNA, 20 nt, Artificial Sequence
  Synthetic
uaaaaucuaaacauccauag

SEQ ID NO: 805286 - RNA, 20 nt, Artificial Sequence
  Synthetic
acaacugcucuacuccauag

SEQ ID NO: 805287 - RNA, 20 nt, Artificial Sequence
  Synthetic
uuuagagagguucuccauag

SEQ ID NO: 805288 - RNA, 20 nt, Artificial Sequence
  Synthetic
cuccaaacgguucuccauag

SEQ ID NO: 805289 - RNA, 20 nt, Artificial Sequence
  Synthetic
uuccauacgguuuuccauag

SEQ ID NO: 805290 - RNA, 20 nt, Artificial Sequence
  Synthetic
aaauuaacugaugagcauag

SEQ ID NO: 805291 - RNA, 20 nt, Artificial Sequence
  Synthetic
auucccuuuucuuagcauag

SEQ ID NO: 805292 - RNA, 20 nt, Artificial Sequence
  Synthetic
aaacaucguacaaggcauag

SEQ ID NO: 805293 - RNA, 20 nt, Artificial Sequence
  Synthetic
uuaaaguuagccaggcauag

SEQ ID NO: 805294 - RNA, 20 nt, Artificial Sequence
  Synthetic
aaaaaauuaggugggcauag

SEQ ID NO: 805295 - RNA, 20 nt, Artificial Sequence
  Synthetic
ugauaauuaacuuggcauag

SEQ ID NO: 805296 - RNA, 20 nt, Artificial Sequence
  Synthetic
auugauucgacagugcauag

SEQ ID NO: 805297 - RNA, 20 nt, Artificial Sequence
  Synthetic
uuucuaguuuauuugcauag

SEQ ID NO: 805298 - RNA, 20 nt, Artificial Sequence
  Synthetic
uuuaaaggagcaaaucauag

SEQ ID NO: 805299 - RNA, 20 nt, Artificial Sequence
  Synthetic
uagauuguugaugaucauag

SEQ ID NO: 805300 - RNA, 20 nt, Artificial Sequence
  Synthetic
ccgggagcuuuuacucauag

SEQ ID NO: 805301 - RNA, 20 nt, Artificial Sequence
  Synthetic
ugugagaugauaucucauag

SEQ ID NO: 805302 - RNA, 20 nt, Artificial Sequence
  Synthetic
uaugggucuuacucucauag

SEQ ID NO: 805303 - RNA, 20 nt, Artificial Sequence
  Synthetic
uaugagaaguugagucauag

SEQ ID NO: 805304 - RNA, 20 nt, Artificial Sequence
  Synthetic
uucaaaauaaaaauucauag

SEQ ID NO: 805305 - RNA, 20 nt, Artificial Sequence
  Synthetic
aaucuaaagcaaauucauag

SEQ ID NO: 805306 - RNA, 20 nt, Artificial Sequence
  Synthetic
uggaucuaaaagguucauag

SEQ ID NO: 805307 - RNA, 20 nt, Artificial Sequence
  Synthetic
ugcauauuuuauuuucauag

SEQ ID NO: 805308 - RNA, 20 nt, Artificial Sequence
  Synthetic
aacaauuacuacaaagauag

SEQ ID NO: 805309 - RNA, 20 nt, Artificial Sequence
  Synthetic
ugaguaaaugggaaagauag

SEQ ID NO: 805310 - RNA, 20 nt, Artificial Sequence
  Synthetic
aauaugggauggaaagauag

SEQ ID NO: 805311 - RNA, 20 nt, Artificial Sequence
  Synthetic
aagaauguucuauaagauag

SEQ ID NO: 805312 - RNA, 20 nt, Artificial Sequence
  Synthetic
uuugcaaaagagacagauag

SEQ ID NO: 805313 - RNA, 20 nt, Artificial Sequence
  Synthetic
cuuugcuuuuaggcagauag

SEQ ID NO: 805314 - RNA, 20 nt, Artificial Sequence
  Synthetic
cauuuguccuccagagauag

SEQ ID NO: 805315 - RNA, 20 nt, Artificial Sequence
  Synthetic
uaaauuauuagcagagauag

SEQ ID NO: 805316 - RNA, 20 nt, Artificial Sequence
  Synthetic
ccuacauuacugagagauag

SEQ ID NO: 805317 - RNA, 20 nt, Artificial Sequence
  Synthetic
uuguauauggugagagauag

SEQ ID NO: 805318 - RNA, 20 nt, Artificial Sequence
  Synthetic
caugaguaacaaggagauag

SEQ ID NO: 805319 - RNA, 20 nt, Artificial Sequence
  Synthetic
acacuagaagaaggagauag

SEQ ID NO: 805320 - RNA, 20 nt, Artificial Sequence
  Synthetic
augaggguuuaaggagauag

SEQ ID NO: 805321 - RNA, 20 nt, Artificial Sequence
  Synthetic
aacugaacacuuggagauag

SEQ ID NO: 805322 - RNA, 20 nt, Artificial Sequence
  Synthetic
cuauucuaugucauagauag

SEQ ID NO: 805323 - RNA, 20 nt, Artificial Sequence
  Synthetic
augucaaucucuauagauag

SEQ ID NO: 805324 - RNA, 20 nt, Artificial Sequence
  Synthetic
cauuuucaguauguagauag

SEQ ID NO: 805325 - RNA, 20 nt, Artificial Sequence
  Synthetic
cuauauacucaguuagauag

SEQ ID NO: 805326 - RNA, 20 nt, Artificial Sequence
  Synthetic
ccagaggcugggaaggauag

SEQ ID NO: 805327 - RNA, 20 nt, Artificial Sequence
  Synthetic
cauuucuaguuuaaggauag

SEQ ID NO: 805328 - RNA, 20 nt, Artificial Sequence
  Synthetic
auucagugggucuaggauag

SEQ ID NO: 805329 - RNA, 20 nt, Artificial Sequence
  Synthetic
cguuaacgugcuuaggauag

SEQ ID NO: 805330 - RNA, 20 nt, Artificial Sequence
  Synthetic
acuucugaaaagauggauag

SEQ ID NO: 805331 - RNA, 20 nt, Artificial Sequence
  Synthetic
aacauucuagagauggauag

SEQ ID NO: 805332 - RNA, 20 nt, Artificial Sequence
  Synthetic
ugucuuaguggucuggauag

SEQ ID NO: 805333 - RNA, 20 nt, Artificial Sequence
  Synthetic
uaugugaguauguuggauag

SEQ ID NO: 805334 - RNA, 20 nt, Artificial Sequence
  Synthetic
aucauuuuuucaaaugauag

SEQ ID NO: 805335 - RNA, 20 nt, Artificial Sequence
  Synthetic
aauaucauaggaaaugauag

SEQ ID NO: 805336 - RNA, 20 nt, Artificial Sequence
  Synthetic
cuucuuucaagcaaugauag

SEQ ID NO: 805337 - RNA, 20 nt, Artificial Sequence
  Synthetic
uuuauaaggcuacaugauag

SEQ ID NO: 805338 - RNA, 20 nt, Artificial Sequence
  Synthetic
ccaugcuauucucaugauag

SEQ ID NO: 805339 - RNA, 20 nt, Artificial Sequence
  Synthetic
ccaugcuguucucaugauag

SEQ ID NO: 805340 - RNA, 20 nt, Artificial Sequence
  Synthetic
cuuugccuaguagaugauag

SEQ ID NO: 805341 - RNA, 20 nt, Artificial Sequence
  Synthetic
agauagguuguuuaugauag

SEQ ID NO: 805342 - RNA, 20 nt, Artificial Sequence
  Synthetic
cacaacucucguacugauag

SEQ ID NO: 805343 - RNA, 20 nt, Artificial Sequence
  Synthetic
uguagaaguaaaccugauag

SEQ ID NO: 805344 - RNA, 20 nt, Artificial Sequence
  Synthetic
uagcuaaacaaaggugauag

SEQ ID NO: 805345 - RNA, 20 nt, Artificial Sequence
  Synthetic
ucaucacccaugugugauag

SEQ ID NO: 805346 - RNA, 20 nt, Artificial Sequence
  Synthetic
aagaucuauuugauugauag

SEQ ID NO: 805347 - RNA, 20 nt, Artificial Sequence
  Synthetic
acacuucuuuaucuugauag

SEQ ID NO: 805348 - RNA, 20 nt, Artificial Sequence
  Synthetic
uauauauaucaaguugauag

SEQ ID NO: 805349 - RNA, 20 nt, Artificial Sequence
  Synthetic
cuggugugggauguugauag

SEQ ID NO: 805350 - RNA, 20 nt, Artificial Sequence
  Synthetic
uugaaaacugaauuugauag

SEQ ID NO: 805351 - RNA, 20 nt, Artificial Sequence
  Synthetic
ccauuuugacauaaauauag

SEQ ID NO: 805352 - RNA, 20 nt, Artificial Sequence
  Synthetic
auuagagaaggagaauauag

SEQ ID NO: 805353 - RNA, 20 nt, Artificial Sequence
  Synthetic
uucaacaacacauaauauag

SEQ ID NO: 805354 - RNA, 20 nt, Artificial Sequence
  Synthetic
aaauacugugcaacauauag

SEQ ID NO: 805355 - RNA, 20 nt, Artificial Sequence
  Synthetic
auauguaucugugcauauag

SEQ ID NO: 805356 - RNA, 20 nt, Artificial Sequence
  Synthetic
uucagcacccaaauauauag

SEQ ID NO: 805357 - RNA, 20 nt, Artificial Sequence
  Synthetic
ccacuggcuucaauauauag

SEQ ID NO: 805358 - RNA, 20 nt, Artificial Sequence
  Synthetic
agagauauggccauauauag

SEQ ID NO: 805359 - RNA, 20 nt, Artificial Sequence
  Synthetic
ccuaguaauaagauauauag

SEQ ID NO: 805360 - RNA, 20 nt, Artificial Sequence
  Synthetic
auuacuuaacugauauauag

SEQ ID NO: 805361 - RNA, 20 nt, Artificial Sequence
  Synthetic
uauuauauuuuacuauauag

SEQ ID NO: 805362 - RNA, 20 nt, Artificial Sequence
  Synthetic
aaagaaacugagguauauag

SEQ ID NO: 805363 - RNA, 20 nt, Artificial Sequence
  Synthetic
uggccuauuuauuuauauag

SEQ ID NO: 805364 - RNA, 20 nt, Artificial Sequence
  Synthetic
auuuacuuuuauuuauauag

SEQ ID NO: 805365 - RNA, 20 nt, Artificial Sequence
  Synthetic
uucauacaaaucaccuauag

SEQ ID NO: 805366 - RNA, 20 nt, Artificial Sequence
  Synthetic
ucuaagguauuuagcuauag

SEQ ID NO: 805367 - RNA, 20 nt, Artificial Sequence
  Synthetic
acuucucaccuccucuauag

SEQ ID NO: 805368 - RNA, 20 nt, Artificial Sequence
  Synthetic
cuccaaacuguucucuauag

SEQ ID NO: 805369 - RNA, 20 nt, Artificial Sequence
  Synthetic
uacauggaugaguucuauag

SEQ ID NO: 805370 - RNA, 20 nt, Artificial Sequence
  Synthetic
ugaugaaggugaaaguauag

SEQ ID NO: 805371 - RNA, 20 nt, Artificial Sequence
  Synthetic
ucagagaacaccaaguauag

SEQ ID NO: 805372 - RNA, 20 nt, Artificial Sequence
  Synthetic
ucagauaaaacacaguauag

SEQ ID NO: 805373 - RNA, 20 nt, Artificial Sequence
  Synthetic
uagggguaauuguaguauag

SEQ ID NO: 805374 - RNA, 20 nt, Artificial Sequence
  Synthetic
acaaagugccugccguauag

SEQ ID NO: 805375 - RNA, 20 nt, Artificial Sequence
  Synthetic
uaaucuguggaaagguauag

SEQ ID NO: 805376 - RNA, 20 nt, Artificial Sequence
  Synthetic
aagaaaaccugaaauuauag

SEQ ID NO: 805377 - RNA, 20 nt, Artificial Sequence
  Synthetic
uagacagcucucaauuauag

SEQ ID NO: 805378 - RNA, 20 nt, Artificial Sequence
  Synthetic
caggacacuaagaauuauag

SEQ ID NO: 805379 - RNA, 20 nt, Artificial Sequence
  Synthetic
aagacauuauuacauuauag

SEQ ID NO: 805380 - RNA, 20 nt, Artificial Sequence
  Synthetic
ugaccucuuucccauuauag

SEQ ID NO: 805381 - RNA, 20 nt, Artificial Sequence
  Synthetic
ucaaagaaccucuauuauag

SEQ ID NO: 805382 - RNA, 20 nt, Artificial Sequence
  Synthetic
uguuaaauaaucacuuauag

SEQ ID NO: 805383 - RNA, 20 nt, Artificial Sequence
  Synthetic
uugguuacacuuccuuauag

SEQ ID NO: 805384 - RNA, 20 nt, Artificial Sequence
  Synthetic
aauguguuaauggcuuauag

SEQ ID NO: 805385 - RNA, 20 nt, Artificial Sequence
  Synthetic
cuuuuauguuuuucuuauag

SEQ ID NO: 805386 - RNA, 20 nt, Artificial Sequence
  Synthetic
ugggagauuaccuguuauag

SEQ ID NO: 805387 - RNA, 20 nt, Artificial Sequence
  Synthetic
auucaagggugaauuuauag

SEQ ID NO: 805388 - RNA, 20 nt, Artificial Sequence
  Synthetic
aauaacauuuuaauuuauag

SEQ ID NO: 805389 - RNA, 20 nt, Artificial Sequence
  Synthetic
uaggugccugugauuuauag

SEQ ID NO: 805390 - RNA, 20 nt, Artificial Sequence
  Synthetic
aacuaggaggaauuuuauag

SEQ ID NO: 805391 - RNA, 20 nt, Artificial Sequence
  Synthetic
uugcauauuuaauuuuauag

SEQ ID NO: 805392 - RNA, 20 nt, Artificial Sequence
  Synthetic
aauaaauuugcauuuuauag

SEQ ID NO: 805393 - RNA, 20 nt, Artificial Sequence
  Synthetic
uauaugaauauauuuuauag

SEQ ID NO: 805394 - RNA, 20 nt, Artificial Sequence
  Synthetic
aaauucagaaaguuuuauag

SEQ ID NO: 805395 - RNA, 20 nt, Artificial Sequence
  Synthetic
uaggcaaguauguuuuauag

SEQ ID NO: 805396 - RNA, 20 nt, Artificial Sequence
  Synthetic
cuuagguccuuguuuuauag

SEQ ID NO: 805397 - RNA, 20 nt, Artificial Sequence
  Synthetic
aaauguugagagaaaacuag

SEQ ID NO: 805398 - RNA, 20 nt, Artificial Sequence
  Synthetic
accccauagguucaaacuag

SEQ ID NO: 805399 - RNA, 20 nt, Artificial Sequence
  Synthetic
aacaaaccaucagaaacuag

SEQ ID NO: 805400 - RNA, 20 nt, Artificial Sequence
  Synthetic
aaaaaagagagugaaacuag

SEQ ID NO: 805401 - RNA, 20 nt, Artificial Sequence
  Synthetic
cacaaauguggugaaacuag

SEQ ID NO: 805402 - RNA, 20 nt, Artificial Sequence
  Synthetic
ccucaccagggauaaacuag

SEQ ID NO: 805403 - RNA, 20 nt, Artificial Sequence
  Synthetic
cuucaauacccaccaacuag

SEQ ID NO: 805404 - RNA, 20 nt, Artificial Sequence
  Synthetic
uuggacaaaugaggaacuag

SEQ ID NO: 805405 - RNA, 20 nt, Artificial Sequence
  Synthetic
cauaguaggggaauaacuag

SEQ ID NO: 805406 - RNA, 20 nt, Artificial Sequence
  Synthetic
aucuuuuucucuguaacuag

SEQ ID NO: 805407 - RNA, 20 nt, Artificial Sequence
  Synthetic
uuuaucacagucaacacuag

SEQ ID NO: 805408 - RNA, 20 nt, Artificial Sequence
  Synthetic
uaagucaugagacacacuag

SEQ ID NO: 805409 - RNA, 20 nt, Artificial Sequence
  Synthetic
cacauggcuagcuacacuag

SEQ ID NO: 805410 - RNA, 20 nt, Artificial Sequence
  Synthetic
caucuaaaauuucccacuag

SEQ ID NO: 805411 - RNA, 20 nt, Artificial Sequence
  Synthetic
acguggcagaugagcacuag

SEQ ID NO: 805412 - RNA, 20 nt, Artificial Sequence
  Synthetic
cugcacguuagaaucacuag

SEQ ID NO: 805413 - RNA, 20 nt, Artificial Sequence
  Synthetic
uucuguguugaucucacuag

SEQ ID NO: 805414 - RNA, 20 nt, Artificial Sequence
  Synthetic
auaaauuugagagucacuag

SEQ ID NO: 805415 - RNA, 20 nt, Artificial Sequence
  Synthetic
aaucaaaaggaaaagacuag

SEQ ID NO: 805416 - RNA, 20 nt, Artificial Sequence
  Synthetic
agagucguggcaaagacuag

SEQ ID NO: 805417 - RNA, 20 nt, Artificial Sequence
  Synthetic
agcaccaacccugagacuag

SEQ ID NO: 805418 - RNA, 20 nt, Artificial Sequence
  Synthetic
aaggagaucagugagacuag

SEQ ID NO: 805419 - RNA, 20 nt, Artificial Sequence
  Synthetic
uuaauuaauugcaggacuag

SEQ ID NO: 805420 - RNA, 20 nt, Artificial Sequence
  Synthetic
auguuauuucaagggacuag

SEQ ID NO: 805421 - RNA, 20 nt, Artificial Sequence
  Synthetic
ucccaaauaacugggacuag

SEQ ID NO: 805422 - RNA, 20 nt, Artificial Sequence
  Synthetic
aucaggacaaaacugacuag

SEQ ID NO: 805423 - RNA, 20 nt, Artificial Sequence
  Synthetic
uuuuugaguccuuauacuag

SEQ ID NO: 805424 - RNA, 20 nt, Artificial Sequence
  Synthetic
uagacccuggggacuacuag

SEQ ID NO: 805425 - RNA, 20 nt, Artificial Sequence
  Synthetic
uacuuuuaaauaccuacuag

SEQ ID NO: 805426 - RNA, 20 nt, Artificial Sequence
  Synthetic
acaugcaucaaagcuacuag

SEQ ID NO: 805427 - RNA, 20 nt, Artificial Sequence
  Synthetic
uuugacuucaaagcuacuag

SEQ ID NO: 805428 - RNA, 20 nt, Artificial Sequence
  Synthetic
aguaguccagaggcuacuag

SEQ ID NO: 805429 - RNA, 20 nt, Artificial Sequence
  Synthetic
auguguguaguuauuacuag

SEQ ID NO: 805430 - RNA, 20 nt, Artificial Sequence
  Synthetic
uucuuuauuagucuuacuag

SEQ ID NO: 805431 - RNA, 20 nt, Artificial Sequence
  Synthetic
uuuuuuaaaauuaaaccuag

SEQ ID NO: 805432 - RNA, 20 nt, Artificial Sequence
  Synthetic
caaaugagggagacaccuag

SEQ ID NO: 805433 - RNA, 20 nt, Artificial Sequence
  Synthetic
ucaucaaaaugaucaccuag

SEQ ID NO: 805434 - RNA, 20 nt, Artificial Sequence
  Synthetic
acugaauacguaauaccuag

SEQ ID NO: 805435 - RNA, 20 nt, Artificial Sequence
  Synthetic
augacugaggagauaccuag

SEQ ID NO: 805436 - RNA, 20 nt, Artificial Sequence
  Synthetic
aaagcuguuccacuaccuag

SEQ ID NO: 805437 - RNA, 20 nt, Artificial Sequence
  Synthetic
ucuguaaucuuucuaccuag

SEQ ID NO: 805438 - RNA, 20 nt, Artificial Sequence
  Synthetic
uucucaucccaggacccuag

SEQ ID NO: 805439 - RNA, 20 nt, Artificial Sequence
  Synthetic
accacuucacuccagccuag

SEQ ID NO: 805440 - RNA, 20 nt, Artificial Sequence
  Synthetic
uaugaauauuugcagccuag

SEQ ID NO: 805441 - RNA, 20 nt, Artificial Sequence
  Synthetic
ugaaagguaauauagccuag

SEQ ID NO: 805442 - RNA, 20 nt, Artificial Sequence
  Synthetic
uacaaaacuagguagccuag

SEQ ID NO: 805443 - RNA, 20 nt, Artificial Sequence
  Synthetic
caacccuugagaaggccuag

SEQ ID NO: 805444 - RNA, 20 nt, Artificial Sequence
  Synthetic
aggacuuuuaagaggccuag

SEQ ID NO: 805445 - RNA, 20 nt, Artificial Sequence
  Synthetic
auauuuuuuagaaugccuag

SEQ ID NO: 805446 - RNA, 20 nt, Artificial Sequence
  Synthetic
cccacuggggcacugccuag

SEQ ID NO: 805447 - RNA, 20 nt, Artificial Sequence
  Synthetic
aguuaucaauaauugccuag

SEQ ID NO: 805448 - RNA, 20 nt, Artificial Sequence
  Synthetic
uuuuguauuagccauccuag

SEQ ID NO: 805449 - RNA, 20 nt, Artificial Sequence
  Synthetic
ccauugcaguuaucuccuag

SEQ ID NO: 805450 - RNA, 20 nt, Artificial Sequence
  Synthetic
uuuuauguacaaguuccuag

SEQ ID NO: 805451 - RNA, 20 nt, Artificial Sequence
  Synthetic
cuugaugucauuguuccuag

SEQ ID NO: 805452 - RNA, 20 nt, Artificial Sequence
  Synthetic
uugcuuaagugcuuuccuag

SEQ ID NO: 805453 - RNA, 20 nt, Artificial Sequence
  Synthetic
cuguaugccuaguuuccuag

SEQ ID NO: 805454 - RNA, 20 nt, Artificial Sequence
  Synthetic
acuucuaugaauuuuccuag

SEQ ID NO: 805455 - RNA, 20 nt, Artificial Sequence
  Synthetic
ucuuuuaaaguggaagcuag

SEQ ID NO: 805456 - RNA, 20 nt, Artificial Sequence
  Synthetic
agguuaauuccugaagcuag

SEQ ID NO: 805457 - RNA, 20 nt, Artificial Sequence
  Synthetic
agucaccuaaggccagcuag

SEQ ID NO: 805458 - RNA, 20 nt, Artificial Sequence
  Synthetic
agcaacauagaugcagcuag

SEQ ID NO: 805459 - RNA, 20 nt, Artificial Sequence
  Synthetic
cuccaucuuugcucagcuag

SEQ ID NO: 805460 - RNA, 20 nt, Artificial Sequence
  Synthetic
aaaaacuguaucucagcuag

SEQ ID NO: 805461 - RNA, 20 nt, Artificial Sequence
  Synthetic
uuuguaagcuugucagcuag

SEQ ID NO: 805462 - RNA, 20 nt, Artificial Sequence
  Synthetic
auaauuaguaguucagcuag

SEQ ID NO: 805463 - RNA, 20 nt, Artificial Sequence
  Synthetic
uagccugggcuaagagcuag

SEQ ID NO: 805464 - RNA, 20 nt, Artificial Sequence
  Synthetic
cccaaaggggaaugagcuag

SEQ ID NO: 805465 - RNA, 20 nt, Artificial Sequence
  Synthetic
ugcuuucaauaaugagcuag

SEQ ID NO: 805466 - RNA, 20 nt, Artificial Sequence
  Synthetic
ccagagacaaagcuagcuag

SEQ ID NO: 805467 - RNA, 20 nt, Artificial Sequence
  Synthetic
cugcucagggaagacgcuag

SEQ ID NO: 805468 - RNA, 20 nt, Artificial Sequence
  Synthetic
ugugcgcgcgcgugcgcuag

SEQ ID NO: 805469 - RNA, 20 nt, Artificial Sequence
  Synthetic
accugaccuaaucaggcuag

SEQ ID NO: 805470 - RNA, 20 nt, Artificial Sequence
  Synthetic
ugcuggagacaggaggcuag

SEQ ID NO: 805471 - RNA, 20 nt, Artificial Sequence
  Synthetic
caaaagccgcaugcggcuag

SEQ ID NO: 805472 - RNA, 20 nt, Artificial Sequence
  Synthetic
uggguuacuuccugggcuag

SEQ ID NO: 805473 - RNA, 20 nt, Artificial Sequence
  Synthetic
uuaagugggacacuggcuag

SEQ ID NO: 805474 - RNA, 20 nt, Artificial Sequence
  Synthetic
uucuuuauuagucuggcuag

SEQ ID NO: 805475 - RNA, 20 nt, Artificial Sequence
  Synthetic
ucaguaucuuauguggcuag

SEQ ID NO: 805476 - RNA, 20 nt, Artificial Sequence
  Synthetic
ucacggcuucuguuggcuag

SEQ ID NO: 805477 - RNA, 20 nt, Artificial Sequence
  Synthetic
agcuuucauuuguuggcuag

SEQ ID NO: 805478 - RNA, 20 nt, Artificial Sequence
  Synthetic
aaaauaugauagaaugcuag

SEQ ID NO: 805479 - RNA, 20 nt, Artificial Sequence
  Synthetic
uaguacugaaaauaugcuag

SEQ ID NO: 805480 - RNA, 20 nt, Artificial Sequence
  Synthetic
ucucagacccugccugcuag

SEQ ID NO: 805481 - RNA, 20 nt, Artificial Sequence
  Synthetic
uuuuaagagacuccugcuag

SEQ ID NO: 805482 - RNA, 20 nt, Artificial Sequence
  Synthetic
cacauccucacuucugcuag

SEQ ID NO: 805483 - RNA, 20 nt, Artificial Sequence
  Synthetic
uucuuuauuagucuugcuag

SEQ ID NO: 805484 - RNA, 20 nt, Artificial Sequence
  Synthetic
ugacuguaugucuuugcuag

SEQ ID NO: 805485 - RNA, 20 nt, Artificial Sequence
  Synthetic
caacaaauugaaaaaucuag

SEQ ID NO: 805486 - RNA, 20 nt, Artificial Sequence
  Synthetic
acacaaacuagaaaaucuag

SEQ ID NO: 805487 - RNA, 20 nt, Artificial Sequence
  Synthetic
cuuuugaguuuaaaaucuag

SEQ ID NO: 805488 - RNA, 20 nt, Artificial Sequence
  Synthetic
auaagcaaccucaaaucuag

SEQ ID NO: 805489 - RNA, 20 nt, Artificial Sequence
  Synthetic
aaagaaugcccaauaucuag

SEQ ID NO: 805490 - RNA, 20 nt, Artificial Sequence
  Synthetic
uaugugggcacaguaucuag

SEQ ID NO: 805491 - RNA, 20 nt, Artificial Sequence
  Synthetic
caguagucauguguaucuag

SEQ ID NO: 805492 - RNA, 20 nt, Artificial Sequence
  Synthetic
agaaaugagugauuaucuag

SEQ ID NO: 805493 - RNA, 20 nt, Artificial Sequence
  Synthetic
aucucacuugaaaacucuag

SEQ ID NO: 805494 - RNA, 20 nt, Artificial Sequence
  Synthetic
aauuuauuuuuaaacucuag

SEQ ID NO: 805495 - RNA, 20 nt, Artificial Sequence
  Synthetic
uuuuaagaugauaacucuag

SEQ ID NO: 805496 - RNA, 20 nt, Artificial Sequence
  Synthetic
acuuuuauuuuaagcucuag

SEQ ID NO: 805497 - RNA, 20 nt, Artificial Sequence
  Synthetic
aacuacacucuaggcucuag

SEQ ID NO: 805498 - RNA, 20 nt, Artificial Sequence
  Synthetic
ugucaaauaacuggcucuag

SEQ ID NO: 805499 - RNA, 20 nt, Artificial Sequence
  Synthetic
uuugagaagcacugcucuag

SEQ ID NO: 805500 - RNA, 20 nt, Artificial Sequence
  Synthetic
cuaauuucucuucucucuag

SEQ ID NO: 805501 - RNA, 20 nt, Artificial Sequence
  Synthetic
agugaaggcaggaagucuag

SEQ ID NO: 805502 - RNA, 20 nt, Artificial Sequence
  Synthetic
ucaguagcuucagagucuag

SEQ ID NO: 805503 - RNA, 20 nt, Artificial Sequence
  Synthetic
cuuguggcagagaggucuag

SEQ ID NO: 805504 - RNA, 20 nt, Artificial Sequence
  Synthetic
aagcaaaacaucuggucuag

SEQ ID NO: 805505 - RNA, 20 nt, Artificial Sequence
  Synthetic
acuugggagaaacugucuag

SEQ ID NO: 805506 - RNA, 20 nt, Artificial Sequence
  Synthetic
uauaauugagagcugucuag

SEQ ID NO: 805507 - RNA, 20 nt, Artificial Sequence
  Synthetic
aggauuuugaaagugucuag

SEQ ID NO: 805508 - RNA, 20 nt, Artificial Sequence
  Synthetic
uacuaugauagagugucuag

SEQ ID NO: 805509 - RNA, 20 nt, Artificial Sequence
  Synthetic
caguagccauaugugucuag

SEQ ID NO: 805510 - RNA, 20 nt, Artificial Sequence
  Synthetic
cauuucugaaccaauucuag

SEQ ID NO: 805511 - RNA, 20 nt, Artificial Sequence
  Synthetic
uaaauggauuuacauucuag

SEQ ID NO: 805512 - RNA, 20 nt, Artificial Sequence
  Synthetic
cauggauucuaucauucuag

SEQ ID NO: 805513 - RNA, 20 nt, Artificial Sequence
  Synthetic
uuaaaccauauucauucuag

SEQ ID NO: 805514 - RNA, 20 nt, Artificial Sequence
  Synthetic
auaaaaugaggagauucuag

SEQ ID NO: 805515 - RNA, 20 nt, Artificial Sequence
  Synthetic
cugauugccuucuauucuag

SEQ ID NO: 805516 - RNA, 20 nt, Artificial Sequence
  Synthetic
uucaaaggcaugccuucuag

SEQ ID NO: 805517 - RNA, 20 nt, Artificial Sequence
  Synthetic
auuaaaagugauaguucuag

SEQ ID NO: 805518 - RNA, 20 nt, Artificial Sequence
  Synthetic
uuauuuaguuuugguucuag

SEQ ID NO: 805519 - RNA, 20 nt, Artificial Sequence
  Synthetic
uaaaaguacccucuuucuag

SEQ ID NO: 805520 - RNA, 20 nt, Artificial Sequence
  Synthetic
ucucgggcaguucuuucuag

SEQ ID NO: 805521 - RNA, 20 nt, Artificial Sequence
  Synthetic
acagaaaauacaaaaaguag

SEQ ID NO: 805522 - RNA, 20 nt, Artificial Sequence
  Synthetic
aaaugggggcaucaaaguag

SEQ ID NO: 805523 - RNA, 20 nt, Artificial Sequence
  Synthetic
uguagauggagagaaaguag

SEQ ID NO: 805524 - RNA, 20 nt, Artificial Sequence
  Synthetic
uguuuuuagauguaaaguag

SEQ ID NO: 805525 - RNA, 20 nt, Artificial Sequence
  Synthetic
uaugagaaaugaggaaguag

SEQ ID NO: 805526 - RNA, 20 nt, Artificial Sequence
  Synthetic
ccaaagaaugggggaaguag

SEQ ID NO: 805527 - RNA, 20 nt, Artificial Sequence
  Synthetic
aaaugacguaacugaaguag

SEQ ID NO: 805528 - RNA, 20 nt, Artificial Sequence
  Synthetic
ugaaaggauuacauaaguag

SEQ ID NO: 805529 - RNA, 20 nt, Artificial Sequence
  Synthetic
cuccuucagugacuaaguag

SEQ ID NO: 805530 - RNA, 20 nt, Artificial Sequence
  Synthetic
uacaaaaacuaauuaaguag

SEQ ID NO: 805531 - RNA, 20 nt, Artificial Sequence
  Synthetic
accucugugggauuaaguag

SEQ ID NO: 805532 - RNA, 20 nt, Artificial Sequence
  Synthetic
aauauaaugccuuuaaguag

SEQ ID NO: 805533 - RNA, 20 nt, Artificial Sequence
  Synthetic
ugugguuugcugaacaguag

SEQ ID NO: 805534 - RNA, 20 nt, Artificial Sequence
  Synthetic
ccuuaagacauuaacaguag

SEQ ID NO: 805535 - RNA, 20 nt, Artificial Sequence
  Synthetic
auucaaaacaucuacaguag

SEQ ID NO: 805536 - RNA, 20 nt, Artificial Sequence
  Synthetic
agauuguaauuuuacaguag

SEQ ID NO: 805537 - RNA, 20 nt, Artificial Sequence
  Synthetic
aaugacuuuuuacccaguag

SEQ ID NO: 805538 - RNA, 20 nt, Artificial Sequence
  Synthetic
uuuuccagagcccccaguag

SEQ ID NO: 805539 - RNA, 20 nt, Artificial Sequence
  Synthetic
uuugucucuguccccaguag

SEQ ID NO: 805540 - RNA, 20 nt, Artificial Sequence
  Synthetic
uuuggauaaaugcccaguag

SEQ ID NO: 805541 - RNA, 20 nt, Artificial Sequence
  Synthetic
uguggagaauuauccaguag

SEQ ID NO: 805542 - RNA, 20 nt, Artificial Sequence
  Synthetic
ucuuuccaugaaggcaguag

SEQ ID NO: 805543 - RNA, 20 nt, Artificial Sequence
  Synthetic
auagagaauagaggcaguag

SEQ ID NO: 805544 - RNA, 20 nt, Artificial Sequence
  Synthetic
acaaaaaaauauugcaguag

SEQ ID NO: 805545 - RNA, 20 nt, Artificial Sequence
  Synthetic
auucacauuugaaucaguag

SEQ ID NO: 805546 - RNA, 20 nt, Artificial Sequence
  Synthetic
aauucuuuagaccucaguag

SEQ ID NO: 805547 - RNA, 20 nt, Artificial Sequence
  Synthetic
ccugaagagaacuagaguag

SEQ ID NO: 805548 - RNA, 20 nt, Artificial Sequence
  Synthetic
agugacagacgaaggaguag

SEQ ID NO: 805549 - RNA, 20 nt, Artificial Sequence
  Synthetic
uauagcaguuuuaggaguag

SEQ ID NO: 805550 - RNA, 20 nt, Artificial Sequence
  Synthetic
agcuucacugcugggaguag

SEQ ID NO: 805551 - RNA, 20 nt, Artificial Sequence
  Synthetic
uuaaaaagugcaaugaguag

SEQ ID NO: 805552 - RNA, 20 nt, Artificial Sequence
  Synthetic
aagcucugccuccugaguag

SEQ ID NO: 805553 - RNA, 20 nt, Artificial Sequence
  Synthetic
cauucaucauugcugaguag

SEQ ID NO: 805554 - RNA, 20 nt, Artificial Sequence
  Synthetic
aggagaggcugucugaguag

SEQ ID NO: 805555 - RNA, 20 nt, Artificial Sequence
  Synthetic
ugccagugccuucugaguag

SEQ ID NO: 805556 - RNA, 20 nt, Artificial Sequence
  Synthetic
aacauaacaucagugaguag

SEQ ID NO: 805557 - RNA, 20 nt, Artificial Sequence
  Synthetic
acugaagaaugagugaguag

SEQ ID NO: 805558 - RNA, 20 nt, Artificial Sequence
  Synthetic
agaagcucacaauugaguag

SEQ ID NO: 805559 - RNA, 20 nt, Artificial Sequence
  Synthetic
auacaauuuuugaauaguag

SEQ ID NO: 805560 - RNA, 20 nt, Artificial Sequence
  Synthetic
cuacaguacaauaauaguag

SEQ ID NO: 805561 - RNA, 20 nt, Artificial Sequence
  Synthetic
ugcagaccaaagcauaguag

SEQ ID NO: 805562 - RNA, 20 nt, Artificial Sequence
  Synthetic
ucucaucacuuucauaguag

SEQ ID NO: 805563 - RNA, 20 nt, Artificial Sequence
  Synthetic
aauucuggcauugauaguag

SEQ ID NO: 805564 - RNA, 20 nt, Artificial Sequence
  Synthetic
acaacauuguuuuauaguag

SEQ ID NO: 805565 - RNA, 20 nt, Artificial Sequence
  Synthetic
uacauacuggaaacuaguag

SEQ ID NO: 805566 - RNA, 20 nt, Artificial Sequence
  Synthetic
cuucugcacugaccuaguag

SEQ ID NO: 805567 - RNA, 20 nt, Artificial Sequence
  Synthetic
cagagcucacaaucuaguag

SEQ ID NO: 805568 - RNA, 20 nt, Artificial Sequence
  Synthetic
uuuuucuaacacucuaguag

SEQ ID NO: 805569 - RNA, 20 nt, Artificial Sequence
  Synthetic
uuuuuaccuaaacguaguag

SEQ ID NO: 805570 - RNA, 20 nt, Artificial Sequence
  Synthetic
auuuuuuguauuuguaguag

SEQ ID NO: 805571 - RNA, 20 nt, Artificial Sequence
  Synthetic
aggguccaagacuuuaguag

SEQ ID NO: 805572 - RNA, 20 nt, Artificial Sequence
  Synthetic
uguguguguauuuuuaguag

SEQ ID NO: 805573 - RNA, 20 nt, Artificial Sequence
  Synthetic
auuuuguguauuuuuaguag

SEQ ID NO: 805574 - RNA, 20 nt, Artificial Sequence
  Synthetic
ucugggugggccaggcguag

SEQ ID NO: 805575 - RNA, 20 nt, Artificial Sequence
  Synthetic
aaaaaaucagccgggcguag

SEQ ID NO: 805576 - RNA, 20 nt, Artificial Sequence
  Synthetic
uagagucuggccgggcguag

SEQ ID NO: 805577 - RNA, 20 nt, Artificial Sequence
  Synthetic
cuugaagaugaggggcguag

SEQ ID NO: 805578 - RNA, 20 nt, Artificial Sequence
  Synthetic
uuucuaguuuauuugcguag

SEQ ID NO: 805579 - RNA, 20 nt, Artificial Sequence
  Synthetic
uaauaaagccaacuucguag

SEQ ID NO: 805580 - RNA, 20 nt, Artificial Sequence
  Synthetic
uguuuucauagaaaagguag

SEQ ID NO: 805581 - RNA, 20 nt, Artificial Sequence
  Synthetic
uuuagcuauuuucaagguag

SEQ ID NO: 805582 - RNA, 20 nt, Artificial Sequence
  Synthetic
aaauuccugaaugaagguag

SEQ ID NO: 805583 - RNA, 20 nt, Artificial Sequence
  Synthetic
augacugaaugcacagguag

SEQ ID NO: 805584 - RNA, 20 nt, Artificial Sequence
  Synthetic
aaggagaggaagagagguag

SEQ ID NO: 805585 - RNA, 20 nt, Artificial Sequence
  Synthetic
aaaggguaguguggagguag

SEQ ID NO: 805586 - RNA, 20 nt, Artificial Sequence
  Synthetic
aauguaauuuaauuagguag

SEQ ID NO: 805587 - RNA, 20 nt, Artificial Sequence
  Synthetic
cucaaaaugaguuuagguag

SEQ ID NO: 805588 - RNA, 20 nt, Artificial Sequence
  Synthetic
cauaaaaauauguacgguag

SEQ ID NO: 805589 - RNA, 20 nt, Artificial Sequence
  Synthetic
cgggauucagaaagcgguag

SEQ ID NO: 805590 - RNA, 20 nt, Artificial Sequence
  Synthetic
aagucccuuuaaaaggguag

SEQ ID NO: 805591 - RNA, 20 nt, Artificial Sequence
  Synthetic
acacaaauaaagaaggguag

SEQ ID NO: 805592 - RNA, 20 nt, Artificial Sequence
  Synthetic
caggagacugggaaggguag

SEQ ID NO: 805593 - RNA, 20 nt, Artificial Sequence
  Synthetic
ccugaugcugggaaggguag

SEQ ID NO: 805594 - RNA, 20 nt, Artificial Sequence
  Synthetic
ccagaggcugugaaggguag

SEQ ID NO: 805595 - RNA, 20 nt, Artificial Sequence
  Synthetic
ucaacaacccucuaggguag

SEQ ID NO: 805596 - RNA, 20 nt, Artificial Sequence
  Synthetic
cagcaaaggaaagcggguag

SEQ ID NO: 805597 - RNA, 20 nt, Artificial Sequence
  Synthetic
cagggaccagggagggguag

SEQ ID NO: 805598 - RNA, 20 nt, Artificial Sequence
  Synthetic
caauucuucccuugggguag

SEQ ID NO: 805599 - RNA, 20 nt, Artificial Sequence
  Synthetic
uuuauuucccaaauggguag

SEQ ID NO: 805600 - RNA, 20 nt, Artificial Sequence
  Synthetic
aacugaagucuaguggguag

SEQ ID NO: 805601 - RNA, 20 nt, Artificial Sequence
  Synthetic
cagaacagucugguggguag

SEQ ID NO: 805602 - RNA, 20 nt, Artificial Sequence
  Synthetic
uacugauuggugguggguag

SEQ ID NO: 805603 - RNA, 20 nt, Artificial Sequence
  Synthetic
ucuaauaucagagaugguag

SEQ ID NO: 805604 - RNA, 20 nt, Artificial Sequence
  Synthetic
aggaucaaguuagaugguag

SEQ ID NO: 805605 - RNA, 20 nt, Artificial Sequence
  Synthetic
aaccugagguauuaugguag

SEQ ID NO: 805606 - RNA, 20 nt, Artificial Sequence
  Synthetic
ucaaaguuauuagcugguag

SEQ ID NO: 805607 - RNA, 20 nt, Artificial Sequence
  Synthetic
uuaaaagaucauucugguag

SEQ ID NO: 805608 - RNA, 20 nt, Artificial Sequence
  Synthetic
agucggugagugagugguag

SEQ ID NO: 805609 - RNA, 20 nt, Artificial Sequence
  Synthetic
acugggaaggguagugguag

SEQ ID NO: 805610 - RNA, 20 nt, Artificial Sequence
  Synthetic
aaauuagccuggcgugguag

SEQ ID NO: 805611 - RNA, 20 nt, Artificial Sequence
  Synthetic
cgcuugaaccugggugguag

SEQ ID NO: 805612 - RNA, 20 nt, Artificial Sequence
  Synthetic
uuaucucauauuugugguag

SEQ ID NO: 805613 - RNA, 20 nt, Artificial Sequence
  Synthetic
acccagugaugucuugguag

SEQ ID NO: 805614 - RNA, 20 nt, Artificial Sequence
  Synthetic
aauggaaauguauuugguag

SEQ ID NO: 805615 - RNA, 20 nt, Artificial Sequence
  Synthetic
uuuuuuuuuuuuuuugguag

SEQ ID NO: 805616 - RNA, 20 nt, Artificial Sequence
  Synthetic
aaugggcauucaaaauguag

SEQ ID NO: 805617 - RNA, 20 nt, Artificial Sequence
  Synthetic
agcauacuucucaaauguag

SEQ ID NO: 805618 - RNA, 20 nt, Artificial Sequence
  Synthetic
ugagacaaugaugaauguag

SEQ ID NO: 805619 - RNA, 20 nt, Artificial Sequence
  Synthetic
uaggucaaaaacuaauguag

SEQ ID NO: 805620 - RNA, 20 nt, Artificial Sequence
  Synthetic
uacuauaaucucuaauguag

SEQ ID NO: 805621 - RNA, 20 nt, Artificial Sequence
  Synthetic
agcuuucaucacacauguag

SEQ ID NO: 805622 - RNA, 20 nt, Artificial Sequence
  Synthetic
cacagggaaaagucauguag

SEQ ID NO: 805623 - RNA, 20 nt, Artificial Sequence
  Synthetic
auucccucuaagggauguag

SEQ ID NO: 805624 - RNA, 20 nt, Artificial Sequence
  Synthetic
uauuccauuuuuggauguag

SEQ ID NO: 805625 - RNA, 20 nt, Artificial Sequence
  Synthetic
ucagccauguaaugauguag

SEQ ID NO: 805626 - RNA, 20 nt, Artificial Sequence
  Synthetic
ucaaugagaucgugauguag

SEQ ID NO: 805627 - RNA, 20 nt, Artificial Sequence
  Synthetic
cagaacuaaugaauauguag

SEQ ID NO: 805628 - RNA, 20 nt, Artificial Sequence
  Synthetic
cagucugaaagaguauguag

SEQ ID NO: 805629 - RNA, 20 nt, Artificial Sequence
  Synthetic
uagaaauauaauuuauguag

SEQ ID NO: 805630 - RNA, 20 nt, Artificial Sequence
  Synthetic
auuaaucaugacaacuguag

SEQ ID NO: 805631 - RNA, 20 nt, Artificial Sequence
  Synthetic
aacuaggauaaagacuguag

SEQ ID NO: 805632 - RNA, 20 nt, Artificial Sequence
  Synthetic
acuccugcugaaaccuguag

SEQ ID NO: 805633 - RNA, 20 nt, Artificial Sequence
  Synthetic
caaaagcuggcaugcuguag

SEQ ID NO: 805634 - RNA, 20 nt, Artificial Sequence
  Synthetic
uuccaguaaaugcucuguag

SEQ ID NO: 805635 - RNA, 20 nt, Artificial Sequence
  Synthetic
augccagugccucucuguag

SEQ ID NO: 805636 - RNA, 20 nt, Artificial Sequence
  Synthetic
ucacccaggcuagaguguag

SEQ ID NO: 805637 - RNA, 20 nt, Artificial Sequence
  Synthetic
uauguaugggccggguguag

SEQ ID NO: 805638 - RNA, 20 nt, Artificial Sequence
  Synthetic
uuucuaguuuauuuguguag

SEQ ID NO: 805639 - RNA, 20 nt, Artificial Sequence
  Synthetic
augacccuuggggguuguag

SEQ ID NO: 805640 - RNA, 20 nt, Artificial Sequence
  Synthetic
uucuauguucaugguuguag

SEQ ID NO: 805641 - RNA, 20 nt, Artificial Sequence
  Synthetic
ugcuuuauuuaacuuuguag

SEQ ID NO: 805642 - RNA, 20 nt, Artificial Sequence
  Synthetic
aaucaaggaaagcuuuguag

SEQ ID NO: 805643 - RNA, 20 nt, Artificial Sequence
  Synthetic
uaaaaauacaaaaaaauuag

SEQ ID NO: 805644 - RNA, 20 nt, Artificial Sequence
  Synthetic
caaaucgaacccaaaauuag

SEQ ID NO: 805645 - RNA, 20 nt, Artificial Sequence
  Synthetic
aaaggagcacagaaaauuag

SEQ ID NO: 805646 - RNA, 20 nt, Artificial Sequence
  Synthetic
cauuuugagaauaaaauuag

SEQ ID NO: 805647 - RNA, 20 nt, Artificial Sequence
  Synthetic
cuaagauccuauaaaauuag

SEQ ID NO: 805648 - RNA, 20 nt, Artificial Sequence
  Synthetic
agucauagauuucaaauuag

SEQ ID NO: 805649 - RNA, 20 nt, Artificial Sequence
  Synthetic
acucaucuaauagaaauuag

SEQ ID NO: 805650 - RNA, 20 nt, Artificial Sequence
  Synthetic
ucaauaccucgugaaauuag

SEQ ID NO: 805651 - RNA, 20 nt, Artificial Sequence
  Synthetic
aaccagcaucuugaaauuag

SEQ ID NO: 805652 - RNA, 20 nt, Artificial Sequence
  Synthetic
agauauuuauuuuaaauuag

SEQ ID NO: 805653 - RNA, 20 nt, Artificial Sequence
  Synthetic
ugcagauugcauacaauuag

SEQ ID NO: 805654 - RNA, 20 nt, Artificial Sequence
  Synthetic
ugcagcauuuugccaauuag

SEQ ID NO: 805655 - RNA, 20 nt, Artificial Sequence
  Synthetic
ucauaauacauugcaauuag

SEQ ID NO: 805656 - RNA, 20 nt, Artificial Sequence
  Synthetic
ucagggacaaagucaauuag

SEQ ID NO: 805657 - RNA, 20 nt, Artificial Sequence
  Synthetic
ugaacaauaaagucaauuag

SEQ ID NO: 805658 - RNA, 20 nt, Artificial Sequence
  Synthetic
acugacucguuuucaauuag

SEQ ID NO: 805659 - RNA, 20 nt, Artificial Sequence
  Synthetic
acugaggucuaaagaauuag

SEQ ID NO: 805660 - RNA, 20 nt, Artificial Sequence
  Synthetic
aucuuuucuuauagaauuag

SEQ ID NO: 805661 - RNA, 20 nt, Artificial Sequence
  Synthetic
uauuaauauaaacgaauuag

SEQ ID NO: 805662 - RNA, 20 nt, Artificial Sequence
  Synthetic
uccucuugauaaggaauuag

SEQ ID NO: 805663 - RNA, 20 nt, Artificial Sequence
  Synthetic
aaauauuuuuggguaauuag

SEQ ID NO: 805664 - RNA, 20 nt, Artificial Sequence
  Synthetic
ucaaaggugcauuuaauuag

SEQ ID NO: 805665 - RNA, 20 nt, Artificial Sequence
  Synthetic
aaaacuuccagaaacauuag

SEQ ID NO: 805666 - RNA, 20 nt, Artificial Sequence
  Synthetic
auuagaggcaagaacauuag

SEQ ID NO: 805667 - RNA, 20 nt, Artificial Sequence
  Synthetic
ugaauagucucuaacauuag

SEQ ID NO: 805668 - RNA, 20 nt, Artificial Sequence
  Synthetic
uccauugaaaaaaccauuag

SEQ ID NO: 805669 - RNA, 20 nt, Artificial Sequence
  Synthetic
cugugcacauuuagcauuag

SEQ ID NO: 805670 - RNA, 20 nt, Artificial Sequence
  Synthetic
caccaaacacuaugcauuag

SEQ ID NO: 805671 - RNA, 20 nt, Artificial Sequence
  Synthetic
uacagaagaguuaucauuag

SEQ ID NO: 805672 - RNA, 20 nt, Artificial Sequence
  Synthetic
uaaauucaaaggcucauuag

SEQ ID NO: 805673 - RNA, 20 nt, Artificial Sequence
  Synthetic
aacauuuccucucucauuag

SEQ ID NO: 805674 - RNA, 20 nt, Artificial Sequence
  Synthetic
ucauuaucacuggucauuag

SEQ ID NO: 805675 - RNA, 20 nt, Artificial Sequence
  Synthetic
agagauggagaacagauuag

SEQ ID NO: 805676 - RNA, 20 nt, Artificial Sequence
  Synthetic
caaauagguggagagauuag

SEQ ID NO: 805677 - RNA, 20 nt, Artificial Sequence
  Synthetic
ugaauacaaagggagauuag

SEQ ID NO: 805678 - RNA, 20 nt, Artificial Sequence
  Synthetic
ucccaagcagcugggauuag

SEQ ID NO: 805679 - RNA, 20 nt, Artificial Sequence
  Synthetic
ucccaaguagcugggauuag

SEQ ID NO: 805680 - RNA, 20 nt, Artificial Sequence
  Synthetic
ucccgaguagcugggauuag

SEQ ID NO: 805681 - RNA, 20 nt, Artificial Sequence
  Synthetic
auucuugauuucuggauuag

SEQ ID NO: 805682 - RNA, 20 nt, Artificial Sequence
  Synthetic
aaacucuuuuguaugauuag

SEQ ID NO: 805683 - RNA, 20 nt, Artificial Sequence
  Synthetic
agauguguaucagugauuag

SEQ ID NO: 805684 - RNA, 20 nt, Artificial Sequence
  Synthetic
uuuguuuuaauuuugauuag

SEQ ID NO: 805685 - RNA, 20 nt, Artificial Sequence
  Synthetic
aagcaauuccaaaauauuag

SEQ ID NO: 805686 - RNA, 20 nt, Artificial Sequence
  Synthetic
aagauaaugauaaauauuag

SEQ ID NO: 805687 - RNA, 20 nt, Artificial Sequence
  Synthetic
aaagaagauaacaauauuag

SEQ ID NO: 805688 - RNA, 20 nt, Artificial Sequence
  Synthetic
cuuuaccaauguaauauuag

SEQ ID NO: 805689 - RNA, 20 nt, Artificial Sequence
  Synthetic
uguucugcacuucauauuag

SEQ ID NO: 805690 - RNA, 20 nt, Artificial Sequence
  Synthetic
cauaaauggauagauauuag

SEQ ID NO: 805691 - RNA, 20 nt, Artificial Sequence
  Synthetic
aagcucugaaauuauauuag

SEQ ID NO: 805692 - RNA, 20 nt, Artificial Sequence
  Synthetic
uggggagugcuugcuauuag

SEQ ID NO: 805693 - RNA, 20 nt, Artificial Sequence
  Synthetic
uggauaguuucaucuauuag

SEQ ID NO: 805694 - RNA, 20 nt, Artificial Sequence
  Synthetic
ugagagccugucucuauuag

SEQ ID NO: 805695 - RNA, 20 nt, Artificial Sequence
  Synthetic
uaauauacucucaguauuag

SEQ ID NO: 805696 - RNA, 20 nt, Artificial Sequence
  Synthetic
uggugcugacucauuauuag

SEQ ID NO: 805697 - RNA, 20 nt, Artificial Sequence
  Synthetic
ugcauguucucacuuauuag

SEQ ID NO: 805698 - RNA, 20 nt, Artificial Sequence
  Synthetic
augggacaauauuuuauuag

SEQ ID NO: 805699 - RNA, 20 nt, Artificial Sequence
  Synthetic
aaguuaacaauaaaacuuag

SEQ ID NO: 805700 - RNA, 20 nt, Artificial Sequence
  Synthetic
uuggaugucaagcaacuuag

SEQ ID NO: 805701 - RNA, 20 nt, Artificial Sequence
  Synthetic
augcauguugaagaacuuag

SEQ ID NO: 805702 - RNA, 20 nt, Artificial Sequence
  Synthetic
aaaaaaucaacugaacuuag

SEQ ID NO: 805703 - RNA, 20 nt, Artificial Sequence
  Synthetic
aagcucuuuagugaacuuag

SEQ ID NO: 805704 - RNA, 20 nt, Artificial Sequence
  Synthetic
caacaugaacuguaacuuag

SEQ ID NO: 805705 - RNA, 20 nt, Artificial Sequence
  Synthetic
uuuuucccaugaacacuuag

SEQ ID NO: 805706 - RNA, 20 nt, Artificial Sequence
  Synthetic
aucuccaauuguacacuuag

SEQ ID NO: 805707 - RNA, 20 nt, Artificial Sequence
  Synthetic
uaacucaucucagcacuuag

SEQ ID NO: 805708 - RNA, 20 nt, Artificial Sequence
  Synthetic
ccuuuuguguaugcacuuag

SEQ ID NO: 805709 - RNA, 20 nt, Artificial Sequence
  Synthetic
aaucuucacaguucacuuag

SEQ ID NO: 805710 - RNA, 20 nt, Artificial Sequence
  Synthetic
aaucugcaguagauacuuag

SEQ ID NO: 805711 - RNA, 20 nt, Artificial Sequence
  Synthetic
uagugaaaauggcuacuuag

SEQ ID NO: 805712 - RNA, 20 nt, Artificial Sequence
  Synthetic
uauguuucccagguacuuag

SEQ ID NO: 805713 - RNA, 20 nt, Artificial Sequence
  Synthetic
agaaaauccuuaaaccuuag

SEQ ID NO: 805714 - RNA, 20 nt, Artificial Sequence
  Synthetic
aagauagauuugacccuuag

SEQ ID NO: 805715 - RNA, 20 nt, Artificial Sequence
  Synthetic
uccuccccuacaucccuuag

SEQ ID NO: 805716 - RNA, 20 nt, Artificial Sequence
  Synthetic
ucagagggugcaggccuuag

SEQ ID NO: 805717 - RNA, 20 nt, Artificial Sequence
  Synthetic
acagcuagaaaaugccuuag

SEQ ID NO: 805718 - RNA, 20 nt, Artificial Sequence
  Synthetic
uuugaagagcauugccuuag

SEQ ID NO: 805719 - RNA, 20 nt, Artificial Sequence
  Synthetic
aaagaaaaggaaauccuuag

SEQ ID NO: 805720 - RNA, 20 nt, Artificial Sequence
  Synthetic
ccuugaaaucuaauccuuag

SEQ ID NO: 805721 - RNA, 20 nt, Artificial Sequence
  Synthetic
aauuuucccaaacuccuuag

SEQ ID NO: 805722 - RNA, 20 nt, Artificial Sequence
  Synthetic
uuugacaaaaucuuccuuag

SEQ ID NO: 805723 - RNA, 20 nt, Artificial Sequence
  Synthetic
cuuugucucuucaagcuuag

SEQ ID NO: 805724 - RNA, 20 nt, Artificial Sequence
  Synthetic
cuccuucugaagaagcuuag

SEQ ID NO: 805725 - RNA, 20 nt, Artificial Sequence
  Synthetic
ucaguaacauagaagcuuag

SEQ ID NO: 805726 - RNA, 20 nt, Artificial Sequence
  Synthetic
uagugaagacaagagcuuag

SEQ ID NO: 805727 - RNA, 20 nt, Artificial Sequence
  Synthetic
aauauauguggggagcuuag

SEQ ID NO: 805728 - RNA, 20 nt, Artificial Sequence
  Synthetic
aguuuuaaaugagggcuuag

SEQ ID NO: 805729 - RNA, 20 nt, Artificial Sequence
  Synthetic
aaguucauggaggggcuuag

SEQ ID NO: 805730 - RNA, 20 nt, Artificial Sequence
  Synthetic
acaugucugugaaugcuuag

SEQ ID NO: 805731 - RNA, 20 nt, Artificial Sequence
  Synthetic
auucacaaaacgaugcuuag

SEQ ID NO: 805732 - RNA, 20 nt, Artificial Sequence
  Synthetic
agaacuugaaaugugcuuag

SEQ ID NO: 805733 - RNA, 20 nt, Artificial Sequence
  Synthetic
uuuuaugcaagguugcuuag

SEQ ID NO: 805734 - RNA, 20 nt, Artificial Sequence
  Synthetic
auuuauuaauaaaaucuuag

SEQ ID NO: 805735 - RNA, 20 nt, Artificial Sequence
  Synthetic
aacagaguaacaaaucuuag

SEQ ID NO: 805736 - RNA, 20 nt, Artificial Sequence
  Synthetic
cuaauaugggugaaucuuag

SEQ ID NO: 805737 - RNA, 20 nt, Artificial Sequence
  Synthetic
cucauucugcaugaucuuag

SEQ ID NO: 805738 - RNA, 20 nt, Artificial Sequence
  Synthetic
ucacuauuuccugaucuuag

SEQ ID NO: 805739 - RNA, 20 nt, Artificial Sequence
  Synthetic
auucaaucuccaacucuuag

SEQ ID NO: 805740 - RNA, 20 nt, Artificial Sequence
  Synthetic
uugagauguggaccucuuag

SEQ ID NO: 805741 - RNA, 20 nt, Artificial Sequence
  Synthetic
acugugccuucuccucuuag

SEQ ID NO: 805742 - RNA, 20 nt, Artificial Sequence
  Synthetic
uaauauggagaaugucuuag

SEQ ID NO: 805743 - RNA, 20 nt, Artificial Sequence
  Synthetic
aaguacaaggaacuucuuag

SEQ ID NO: 805744 - RNA, 20 nt, Artificial Sequence
  Synthetic
ugguugaaguggguucuuag

SEQ ID NO: 805745 - RNA, 20 nt, Artificial Sequence
  Synthetic
aaaaagaagaaaaaaguuag

SEQ ID NO: 805746 - RNA, 20 nt, Artificial Sequence
  Synthetic
aaacaacuuaaaaaaguuag

SEQ ID NO: 805747 - RNA, 20 nt, Artificial Sequence
  Synthetic
aaugcuagaugacaaguuag

SEQ ID NO: 805748 - RNA, 20 nt, Artificial Sequence
  Synthetic
acacuccugagggaaguuag

SEQ ID NO: 805749 - RNA, 20 nt, Artificial Sequence
  Synthetic
uacacggagccagcaguuag

SEQ ID NO: 805750 - RNA, 20 nt, Artificial Sequence
  Synthetic
uaagcuagaugacgaguuag

SEQ ID NO: 805751 - RNA, 20 nt, Artificial Sequence
  Synthetic
aaugcuagaugacgaguuag

SEQ ID NO: 805752 - RNA, 20 nt, Artificial Sequence
  Synthetic
aaugcuagaugaugaguuag

SEQ ID NO: 805753 - RNA, 20 nt, Artificial Sequence
  Synthetic
uaaagauuacuuuuaguuag

SEQ ID NO: 805754 - RNA, 20 nt, Artificial Sequence
  Synthetic
aaugcuagaugacacguuag

SEQ ID NO: 805755 - RNA, 20 nt, Artificial Sequence
  Synthetic
aaccuuaaaaaaaagguuag

SEQ ID NO: 805756 - RNA, 20 nt, Artificial Sequence
  Synthetic
aaaaaauuauucaagguuag

SEQ ID NO: 805757 - RNA, 20 nt, Artificial Sequence
  Synthetic
uuacaauuuuggaagguuag

SEQ ID NO: 805758 - RNA, 20 nt, Artificial Sequence
  Synthetic
agacuggaagaagagguuag

SEQ ID NO: 805759 - RNA, 20 nt, Artificial Sequence
  Synthetic
cugugaagugguuagguuag

SEQ ID NO: 805760 - RNA, 20 nt, Artificial Sequence
  Synthetic
agacagcagaagaggguuag

SEQ ID NO: 805761 - RNA, 20 nt, Artificial Sequence
  Synthetic
uuaggcauauggaggguuag

SEQ ID NO: 805762 - RNA, 20 nt, Artificial Sequence
  Synthetic
ucaaacaaugugaggguuag

SEQ ID NO: 805763 - RNA, 20 nt, Artificial Sequence
  Synthetic
aaugcuagaugacggguuag

SEQ ID NO: 805764 - RNA, 20 nt, Artificial Sequence
  Synthetic
cucaggggaugggggguuag

SEQ ID NO: 805765 - RNA, 20 nt, Artificial Sequence
  Synthetic
aggcuagagaaauggguuag

SEQ ID NO: 805766 - RNA, 20 nt, Artificial Sequence
  Synthetic
caauagcuacaugugguuag

SEQ ID NO: 805767 - RNA, 20 nt, Artificial Sequence
  Synthetic
uucugcuggccugugguuag

SEQ ID NO: 805768 - RNA, 20 nt, Artificial Sequence
  Synthetic
caugauuuccugaauguuag

SEQ ID NO: 805769 - RNA, 20 nt, Artificial Sequence
  Synthetic
aauuuuaucaacuauguuag

SEQ ID NO: 805770 - RNA, 20 nt, Artificial Sequence
  Synthetic
cuuuggaaauuuuauguuag

SEQ ID NO: 805771 - RNA, 20 nt, Artificial Sequence
  Synthetic
ucuuaaaaaccuccuguuag

SEQ ID NO: 805772 - RNA, 20 nt, Artificial Sequence
  Synthetic
uuuuuaaaaacauguguuag

SEQ ID NO: 805773 - RNA, 20 nt, Artificial Sequence
  Synthetic
uuuguuaggcauuguguuag

SEQ ID NO: 805774 - RNA, 20 nt, Artificial Sequence
  Synthetic
aggcuggucagauuuguuag

SEQ ID NO: 805775 - RNA, 20 nt, Artificial Sequence
  Synthetic
ucagaaaaaaaaaaauuuag

SEQ ID NO: 805776 - RNA, 20 nt, Artificial Sequence
  Synthetic
uuaaauugcccaaaauuuag

SEQ ID NO: 805777 - RNA, 20 nt, Artificial Sequence
  Synthetic
cauguaaagugacaauuuag

SEQ ID NO: 805778 - RNA, 20 nt, Artificial Sequence
  Synthetic
aaagaaagcugauaauuuag

SEQ ID NO: 805779 - RNA, 20 nt, Artificial Sequence
  Synthetic
ccacauagaauauaauuuag

SEQ ID NO: 805780 - RNA, 20 nt, Artificial Sequence
  Synthetic
caagaaaaaguaacauuuag

SEQ ID NO: 805781 - RNA, 20 nt, Artificial Sequence
  Synthetic
acuuaguuugauacauuuag

SEQ ID NO: 805782 - RNA, 20 nt, Artificial Sequence
  Synthetic
auuauccugguaccauuuag

SEQ ID NO: 805783 - RNA, 20 nt, Artificial Sequence
  Synthetic
uguaaaauuaaggcauuuag

SEQ ID NO: 805784 - RNA, 20 nt, Artificial Sequence
  Synthetic
accagaggcuguggauuuag

SEQ ID NO: 805785 - RNA, 20 nt, Artificial Sequence
  Synthetic
ugcagacuguaaauauuuag

SEQ ID NO: 805786 - RNA, 20 nt, Artificial Sequence
  Synthetic
uucauucgaaacauauuuag

SEQ ID NO: 805787 - RNA, 20 nt, Artificial Sequence
  Synthetic
cagaggaaagcuauauuuag

SEQ ID NO: 805788 - RNA, 20 nt, Artificial Sequence
  Synthetic
cucaucugaaagcuauuuag

SEQ ID NO: 805789 - RNA, 20 nt, Artificial Sequence
  Synthetic
ugauguuuugagcuauuuag

SEQ ID NO: 805790 - RNA, 20 nt, Artificial Sequence
  Synthetic
acagcuaaagcaguauuuag

SEQ ID NO: 805791 - RNA, 20 nt, Artificial Sequence
  Synthetic
acacaugcugaauuauuuag

SEQ ID NO: 805792 - RNA, 20 nt, Artificial Sequence
  Synthetic
cuggcuuuggaguuauuuag

SEQ ID NO: 805793 - RNA, 20 nt, Artificial Sequence
  Synthetic
uuuguucagcauuuauuuag

SEQ ID NO: 805794 - RNA, 20 nt, Artificial Sequence
  Synthetic
cacaaaggaauuuuauuuag

SEQ ID NO: 805795 - RNA, 20 nt, Artificial Sequence
  Synthetic
uguaaauuugacaacuuuag

SEQ ID NO: 805796 - RNA, 20 nt, Artificial Sequence
  Synthetic
uacuucuaaauuaacuuuag

SEQ ID NO: 805797 - RNA, 20 nt, Artificial Sequence
  Synthetic
cuguaauuucagcacuuuag

SEQ ID NO: 805798 - RNA, 20 nt, Artificial Sequence
  Synthetic
uguugccucagagacuuuag

SEQ ID NO: 805799 - RNA, 20 nt, Artificial Sequence
  Synthetic
uuguuacuuuaggacuuuag

SEQ ID NO: 805800 - RNA, 20 nt, Artificial Sequence
  Synthetic
acuaauuuuuuguacuuuag

SEQ ID NO: 805801 - RNA, 20 nt, Artificial Sequence
  Synthetic
uagcauaaaauucccuuuag

SEQ ID NO: 805802 - RNA, 20 nt, Artificial Sequence
  Synthetic
acgccauacaaagccuuuag

SEQ ID NO: 805803 - RNA, 20 nt, Artificial Sequence
  Synthetic
aacauaggaaaugccuuuag

SEQ ID NO: 805804 - RNA, 20 nt, Artificial Sequence
  Synthetic
acucaucucccuggcuuuag

SEQ ID NO: 805805 - RNA, 20 nt, Artificial Sequence
  Synthetic
uauugccucagccucuuuag

SEQ ID NO: 805806 - RNA, 20 nt, Artificial Sequence
  Synthetic
aagcugggaaaaaaguuuag

SEQ ID NO: 805807 - RNA, 20 nt, Artificial Sequence
  Synthetic
ucaagaagcuuaaaguuuag

SEQ ID NO: 805808 - RNA, 20 nt, Artificial Sequence
  Synthetic
cauuauaauuaacaguuuag

SEQ ID NO: 805809 - RNA, 20 nt, Artificial Sequence
  Synthetic
uuuaagaacggucaguuuag

SEQ ID NO: 805810 - RNA, 20 nt, Artificial Sequence
  Synthetic
caagaauuccuucaguuuag

SEQ ID NO: 805811 - RNA, 20 nt, Artificial Sequence
  Synthetic
uuaggcacuuuggaguuuag

SEQ ID NO: 805812 - RNA, 20 nt, Artificial Sequence
  Synthetic
uucuuugaucuguaguuuag

SEQ ID NO: 805813 - RNA, 20 nt, Artificial Sequence
  Synthetic
aagcagauaucagcguuuag

SEQ ID NO: 805814 - RNA, 20 nt, Artificial Sequence
  Synthetic
ucuggggaaaaaagguuuag

SEQ ID NO: 805815 - RNA, 20 nt, Artificial Sequence
  Synthetic
uuaaggagccugagguuuag

SEQ ID NO: 805816 - RNA, 20 nt, Artificial Sequence
  Synthetic
aggucauaugguggguuuag

SEQ ID NO: 805817 - RNA, 20 nt, Artificial Sequence
  Synthetic
uuuuggagcugaauguuuag

SEQ ID NO: 805818 - RNA, 20 nt, Artificial Sequence
  Synthetic
acauauaaugcuauguuuag

SEQ ID NO: 805819 - RNA, 20 nt, Artificial Sequence
  Synthetic
aguggacaauuauuguuuag

SEQ ID NO: 805820 - RNA, 20 nt, Artificial Sequence
  Synthetic
uagcuauguuuccauuuuag

SEQ ID NO: 805821 - RNA, 20 nt, Artificial Sequence
  Synthetic
aagaacuuuaaauauuuuag

SEQ ID NO: 805822 - RNA, 20 nt, Artificial Sequence
  Synthetic
acauaugccaaguauuuuag

SEQ ID NO: 805823 - RNA, 20 nt, Artificial Sequence
  Synthetic
cauuacuauuauuauuuuag

SEQ ID NO: 805824 - RNA, 20 nt, Artificial Sequence
  Synthetic
aaauaauuagguuauuuuag

SEQ ID NO: 805825 - RNA, 20 nt, Artificial Sequence
  Synthetic
uuuucuucuaucacuuuuag

SEQ ID NO: 805826 - RNA, 20 nt, Artificial Sequence
  Synthetic
aaaauuuaacuuucuuuuag

SEQ ID NO: 805827 - RNA, 20 nt, Artificial Sequence
  Synthetic
uaucugaaacaaaguuuuag

SEQ ID NO: 805828 - RNA, 20 nt, Artificial Sequence
  Synthetic
aauugaaugagcaguuuuag

SEQ ID NO: 805829 - RNA, 20 nt, Artificial Sequence
  Synthetic
ccuucagcucucaguuuuag

SEQ ID NO: 805830 - RNA, 20 nt, Artificial Sequence
  Synthetic
uucugucagaauaguuuuag

SEQ ID NO: 805831 - RNA, 20 nt, Artificial Sequence
  Synthetic
auugcuuggaauaguuuuag

SEQ ID NO: 805832 - RNA, 20 nt, Artificial Sequence
  Synthetic
ugagcauauuuggguuuuag

SEQ ID NO: 805833 - RNA, 20 nt, Artificial Sequence
  Synthetic
uuggccugagugauuuuuag

SEQ ID NO: 805834 - RNA, 20 nt, Artificial Sequence
  Synthetic
agacauuugauuauuuuuag

SEQ ID NO: 805835 - RNA, 20 nt, Artificial Sequence
  Synthetic
uaaaugacaucccuuuuuag

SEQ ID NO: 805836 - RNA, 20 nt, Artificial Sequence
  Synthetic
uuuuucaagagucuuuuuag

SEQ ID NO: 805837 - RNA, 20 nt, Artificial Sequence
  Synthetic
auaaucacgcuuguuuuuag

SEQ ID NO: 805838 - RNA, 20 nt, Artificial Sequence
  Synthetic
uaauguagucaguuuuuuag

SEQ ID NO: 805839 - RNA, 20 nt, Artificial Sequence
  Synthetic
cacuuuguauaguuuuuuag

SEQ ID NO: 805840 - RNA, 20 nt, Artificial Sequence
  Synthetic
ucuuucucuaauuuuuuuag

SEQ ID NO: 805841 - RNA, 20 nt, Artificial Sequence
  Synthetic
aacugaaaaagcaaaaaacg

SEQ ID NO: 805842 - RNA, 20 nt, Artificial Sequence
  Synthetic
caagagggugaugaaaaacg

SEQ ID NO: 805843 - RNA, 20 nt, Artificial Sequence
  Synthetic
agacuucuauuuuaaaaacg

SEQ ID NO: 805844 - RNA, 20 nt, Artificial Sequence
  Synthetic
aagaauggagaaacaaaacg

SEQ ID NO: 805845 - RNA, 20 nt, Artificial Sequence
  Synthetic
aaauaaggagacgcaaaacg

SEQ ID NO: 805846 - RNA, 20 nt, Artificial Sequence
  Synthetic
augaauggauaaagaaaacg

SEQ ID NO: 805847 - RNA, 20 nt, Artificial Sequence
  Synthetic
uagacuggauaaagaaaacg

SEQ ID NO: 805848 - RNA, 20 nt, Artificial Sequence
  Synthetic
uggacagucucaggaaaacg

SEQ ID NO: 805849 - RNA, 20 nt, Artificial Sequence
  Synthetic
uaugguacuauaugaaaacg

SEQ ID NO: 805850 - RNA, 20 nt, Artificial Sequence
  Synthetic
cacaguaaguucuuaaaacg

SEQ ID NO: 805851 - RNA, 20 nt, Artificial Sequence
  Synthetic
uuguauuuuuuguccaaacg

SEQ ID NO: 805852 - RNA, 20 nt, Artificial Sequence
  Synthetic
acugaaugguaaugcaaacg

SEQ ID NO: 805853 - RNA, 20 nt, Artificial Sequence
  Synthetic
uaugaacaugggaagaaacg

SEQ ID NO: 805854 - RNA, 20 nt, Artificial Sequence
  Synthetic
acacuuuauuuacagaaacg

SEQ ID NO: 805855 - RNA, 20 nt, Artificial Sequence
  Synthetic
uugacacuggaagagaaacg

SEQ ID NO: 805856 - RNA, 20 nt, Artificial Sequence
  Synthetic
aagagccacauggagaaacg

SEQ ID NO: 805857 - RNA, 20 nt, Artificial Sequence
  Synthetic
uuguauuuuugguagaaacg

SEQ ID NO: 805858 - RNA, 20 nt, Artificial Sequence
  Synthetic
ugcuguaaugacaggaaacg

SEQ ID NO: 805859 - RNA, 20 nt, Artificial Sequence
  Synthetic
caagcuacugaagggaaacg

SEQ ID NO: 805860 - RNA, 20 nt, Artificial Sequence
  Synthetic
ugaaacaucuacaugaaacg

SEQ ID NO: 805861 - RNA, 20 nt, Artificial Sequence
  Synthetic
augcauuuaacaaauaaacg

SEQ ID NO: 805862 - RNA, 20 nt, Artificial Sequence
  Synthetic
uggauugaaugaaauaaacg

SEQ ID NO: 805863 - RNA, 20 nt, Artificial Sequence
  Synthetic
agaacaaagcuuccacaacg

SEQ ID NO: 805864 - RNA, 20 nt, Artificial Sequence
  Synthetic
acuuguuaacaaagacaacg

SEQ ID NO: 805865 - RNA, 20 nt, Artificial Sequence
  Synthetic
uuuugacaagaaugacaacg

SEQ ID NO: 805866 - RNA, 20 nt, Artificial Sequence
  Synthetic
aggagaaugagaaaccaacg

SEQ ID NO: 805867 - RNA, 20 nt, Artificial Sequence
  Synthetic
cgagaccagcuugaccaacg

SEQ ID NO: 805868 - RNA, 20 nt, Artificial Sequence
  Synthetic
uggaaacuuaauccccaacg

SEQ ID NO: 805869 - RNA, 20 nt, Artificial Sequence
  Synthetic
caggugucaggaagccaacg

SEQ ID NO: 805870 - RNA, 20 nt, Artificial Sequence
  Synthetic
cgagaccagccuggccaacg

SEQ ID NO: 805871 - RNA, 20 nt, Artificial Sequence
  Synthetic
ugaagagacauauuccaacg

SEQ ID NO: 805872 - RNA, 20 nt, Artificial Sequence
  Synthetic
ccugacaaaaacaagcaacg

SEQ ID NO: 805873 - RNA, 20 nt, Artificial Sequence
  Synthetic
uccugucauuugcagcaacg

SEQ ID NO: 805874 - RNA, 20 nt, Artificial Sequence
  Synthetic
uaagaccagccugaucaacg

SEQ ID NO: 805875 - RNA, 20 nt, Artificial Sequence
  Synthetic
acuucuacuuuuaaagaacg

SEQ ID NO: 805876 - RNA, 20 nt, Artificial Sequence
  Synthetic
uaaacagugaaaacagaacg

SEQ ID NO: 805877 - RNA, 20 nt, Artificial Sequence
  Synthetic
uuugauuggcagacagaacg

SEQ ID NO: 805878 - RNA, 20 nt, Artificial Sequence
  Synthetic
auuaacuguguuccagaacg

SEQ ID NO: 805879 - RNA, 20 nt, Artificial Sequence
  Synthetic
uaaucacaucauggagaacg

SEQ ID NO: 805880 - RNA, 20 nt, Artificial Sequence
  Synthetic
uuuuaaauccaucaugaacg

SEQ ID NO: 805881 - RNA, 20 nt, Artificial Sequence
  Synthetic
uuauacugugguagugaacg

SEQ ID NO: 805882 - RNA, 20 nt, Artificial Sequence
  Synthetic
auucaggaauaaaaauaacg

SEQ ID NO: 805883 - RNA, 20 nt, Artificial Sequence
  Synthetic
auaaucacaucaggauaacg

SEQ ID NO: 805884 - RNA, 20 nt, Artificial Sequence
  Synthetic
uguacagcauguuacuaacg

SEQ ID NO: 805885 - RNA, 20 nt, Artificial Sequence
  Synthetic
aagauauaucacagcuaacg

SEQ ID NO: 805886 - RNA, 20 nt, Artificial Sequence
  Synthetic
auguaguucaagggcuaacg

SEQ ID NO: 805887 - RNA, 20 nt, Artificial Sequence
  Synthetic
agaaauuugcauauguaacg

SEQ ID NO: 805888 - RNA, 20 nt, Artificial Sequence
  Synthetic
ccuuccuaccauguguaacg

SEQ ID NO: 805889 - RNA, 20 nt, Artificial Sequence
  Synthetic
agaugaaacugggauuaacg

SEQ ID NO: 805890 - RNA, 20 nt, Artificial Sequence
  Synthetic
acugaaagcuugcaaacacg

SEQ ID NO: 805891 - RNA, 20 nt, Artificial Sequence
  Synthetic
auggucccucccacaacacg

SEQ ID NO: 805892 - RNA, 20 nt, Artificial Sequence
  Synthetic
uagcuccacaugagaacacg

SEQ ID NO: 805893 - RNA, 20 nt, Artificial Sequence
  Synthetic
uauugugaacuguccacacg

SEQ ID NO: 805894 - RNA, 20 nt, Artificial Sequence
  Synthetic
caaucaccagagcucacacg

SEQ ID NO: 805895 - RNA, 20 nt, Artificial Sequence
  Synthetic
aaaugccuucaggggacacg

SEQ ID NO: 805896 - RNA, 20 nt, Artificial Sequence
  Synthetic
cuggucucucccuugacacg

SEQ ID NO: 805897 - RNA, 20 nt, Artificial Sequence
  Synthetic
aguuugcugagaaaaccacg

SEQ ID NO: 805898 - RNA, 20 nt, Artificial Sequence
  Synthetic
uccacagacucaacaccacg

SEQ ID NO: 805899 - RNA, 20 nt, Artificial Sequence
  Synthetic
cccugggacagagcaccacg

SEQ ID NO: 805900 - RNA, 20 nt, Artificial Sequence
  Synthetic
uugagcccacugagaccacg

SEQ ID NO: 805901 - RNA, 20 nt, Artificial Sequence
  Synthetic
ugauaaaauguuuacccacg

SEQ ID NO: 805902 - RNA, 20 nt, Artificial Sequence
  Synthetic
uaacucucccacaucccacg

SEQ ID NO: 805903 - RNA, 20 nt, Artificial Sequence
  Synthetic
ugauucaauuaccucccacg

SEQ ID NO: 805904 - RNA, 20 nt, Artificial Sequence
  Synthetic
caggcuugccuuaugccacg

SEQ ID NO: 805905 - RNA, 20 nt, Artificial Sequence
  Synthetic
aagcuuuggcaacugccacg

SEQ ID NO: 805906 - RNA, 20 nt, Artificial Sequence
  Synthetic
uuucacguuugugguccacg

SEQ ID NO: 805907 - RNA, 20 nt, Artificial Sequence
  Synthetic
cuuuuaucuauguaagcacg

SEQ ID NO: 805908 - RNA, 20 nt, Artificial Sequence
  Synthetic
uuugccucuuagugcgcacg

SEQ ID NO: 805909 - RNA, 20 nt, Artificial Sequence
  Synthetic
cuuaacaugugcaaggcacg

SEQ ID NO: 805910 - RNA, 20 nt, Artificial Sequence
  Synthetic
cugcagcuuuuccaggcacg

SEQ ID NO: 805911 - RNA, 20 nt, Artificial Sequence
  Synthetic
ucucccagucaggaggcacg

SEQ ID NO: 805912 - RNA, 20 nt, Artificial Sequence
  Synthetic
uaugccauaaaauaggcacg

SEQ ID NO: 805913 - RNA, 20 nt, Artificial Sequence
  Synthetic
uucaagugauacuuggcacg

SEQ ID NO: 805914 - RNA, 20 nt, Artificial Sequence
  Synthetic
uauuaaaacacaggugcacg

SEQ ID NO: 805915 - RNA, 20 nt, Artificial Sequence
  Synthetic
ugggagguaauugaaucacg

SEQ ID NO: 805916 - RNA, 20 nt, Artificial Sequence
  Synthetic
uagcucccuauuauaucacg

SEQ ID NO: 805917 - RNA, 20 nt, Artificial Sequence
  Synthetic
ugugacagugaguucucacg

SEQ ID NO: 805918 - RNA, 20 nt, Artificial Sequence
  Synthetic
aauugucaaagcaagucacg

SEQ ID NO: 805919 - RNA, 20 nt, Artificial Sequence
  Synthetic
uuuguuuuaaucaagucacg

SEQ ID NO: 805920 - RNA, 20 nt, Artificial Sequence
  Synthetic
aucauccaaaggaagucacg

SEQ ID NO: 805921 - RNA, 20 nt, Artificial Sequence
  Synthetic
uuuacaccauuguagucacg

SEQ ID NO: 805922 - RNA, 20 nt, Artificial Sequence
  Synthetic
cccagaagggcuuugucacg

SEQ ID NO: 805923 - RNA, 20 nt, Artificial Sequence
  Synthetic
acuuaagucaggaauucacg

SEQ ID NO: 805924 - RNA, 20 nt, Artificial Sequence
  Synthetic
uuguaguuuuaguaaagacg

SEQ ID NO: 805925 - RNA, 20 nt, Artificial Sequence
  Synthetic
uacuauuuuuaguaaagacg

SEQ ID NO: 805926 - RNA, 20 nt, Artificial Sequence
  Synthetic
acagagcauuugucaagacg

SEQ ID NO: 805927 - RNA, 20 nt, Artificial Sequence
  Synthetic
aguagaaacauuauaagacg

SEQ ID NO: 805928 - RNA, 20 nt, Artificial Sequence
  Synthetic
cauguacuuuuucuaagacg

SEQ ID NO: 805929 - RNA, 20 nt, Artificial Sequence
  Synthetic
auuguucuaauuuuaagacg

SEQ ID NO: 805930 - RNA, 20 nt, Artificial Sequence
  Synthetic
aagaguaucaaggacagacg

SEQ ID NO: 805931 - RNA, 20 nt, Artificial Sequence
  Synthetic
uuguguuuuuaguacagacg

SEQ ID NO: 805932 - RNA, 20 nt, Artificial Sequence
  Synthetic
auacaaaacuuagccagacg

SEQ ID NO: 805933 - RNA, 20 nt, Artificial Sequence
  Synthetic
uuguauuuuuagcagagacg

SEQ ID NO: 805934 - RNA, 20 nt, Artificial Sequence
  Synthetic
uuguauuuuaaguagagacg

SEQ ID NO: 805935 - RNA, 20 nt, Artificial Sequence
  Synthetic
uuguaucuuuaguagagacg

SEQ ID NO: 805936 - RNA, 20 nt, Artificial Sequence
  Synthetic
uuguaauuuuaguagagacg

SEQ ID NO: 805937 - RNA, 20 nt, Artificial Sequence
  Synthetic
uuauauuuuuaguagagacg

SEQ ID NO: 805938 - RNA, 20 nt, Artificial Sequence
  Synthetic
uuguauuuuuaguagagacg

SEQ ID NO: 805939 - RNA, 20 nt, Artificial Sequence
  Synthetic
uguauuuuuuaguagagacg

SEQ ID NO: 805940 - RNA, 20 nt, Artificial Sequence
  Synthetic
uguguuuuuuaguagagacg

SEQ ID NO: 805941 - RNA, 20 nt, Artificial Sequence
  Synthetic
uacauuuuuauguagagacg

SEQ ID NO: 805942 - RNA, 20 nt, Artificial Sequence
  Synthetic
uuuguacuuuaguggagacg

SEQ ID NO: 805943 - RNA, 20 nt, Artificial Sequence
  Synthetic
uuguaucuuuaguggagacg

SEQ ID NO: 805944 - RNA, 20 nt, Artificial Sequence
  Synthetic
uuguauuuuuaguggagacg

SEQ ID NO: 805945 - RNA, 20 nt, Artificial Sequence
  Synthetic
uuagagcaaauucugagacg

SEQ ID NO: 805946 - RNA, 20 nt, Artificial Sequence
  Synthetic
uauuugcaaggagugagacg

SEQ ID NO: 805947 - RNA, 20 nt, Artificial Sequence
  Synthetic
uuguauuuuuaguguagacg

SEQ ID NO: 805948 - RNA, 20 nt, Artificial Sequence
  Synthetic
caguuuuaaacaugaggacg

SEQ ID NO: 805949 - RNA, 20 nt, Artificial Sequence
  Synthetic
uacaaaaaauuacccggacg

SEQ ID NO: 805950 - RNA, 20 nt, Artificial Sequence
  Synthetic
uuguauuuuuaguagggacg

SEQ ID NO: 805951 - RNA, 20 nt, Artificial Sequence
  Synthetic
ucaaguccuuuguagggacg

SEQ ID NO: 805952 - RNA, 20 nt, Artificial Sequence
  Synthetic
ugucguggggugaggggacg

SEQ ID NO: 805953 - RNA, 20 nt, Artificial Sequence
  Synthetic
agcacagguuuggggggacg

SEQ ID NO: 805954 - RNA, 20 nt, Artificial Sequence
  Synthetic
aaucaccugaaccugggacg

SEQ ID NO: 805955 - RNA, 20 nt, Artificial Sequence
  Synthetic
uugucugggggugugggacg

SEQ ID NO: 805956 - RNA, 20 nt, Artificial Sequence
  Synthetic
aaaaagcuacuuuuaugacg

SEQ ID NO: 805957 - RNA, 20 nt, Artificial Sequence
  Synthetic
uuguacauuugccauugacg

SEQ ID NO: 805958 - RNA, 20 nt, Artificial Sequence
  Synthetic
acauauaugguauaaauacg

SEQ ID NO: 805959 - RNA, 20 nt, Artificial Sequence
  Synthetic
aguuaacgcugagcaauacg

SEQ ID NO: 805960 - RNA, 20 nt, Artificial Sequence
  Synthetic
agucccugaacuggaauacg

SEQ ID NO: 805961 - RNA, 20 nt, Artificial Sequence
  Synthetic
accucucuccccaacauacg

SEQ ID NO: 805962 - RNA, 20 nt, Artificial Sequence
  Synthetic
aguaguugcaaacacauacg

SEQ ID NO: 805963 - RNA, 20 nt, Artificial Sequence
  Synthetic
uuuggagacaauaucauacg

SEQ ID NO: 805964 - RNA, 20 nt, Artificial Sequence
  Synthetic
auaauuuucaacaagauacg

SEQ ID NO: 805965 - RNA, 20 nt, Artificial Sequence
  Synthetic
uuguauuuuaaguagauacg

SEQ ID NO: 805966 - RNA, 20 nt, Artificial Sequence
  Synthetic
cauauguucucacugauacg

SEQ ID NO: 805967 - RNA, 20 nt, Artificial Sequence
  Synthetic
uccguuagcaucaauauacg

SEQ ID NO: 805968 - RNA, 20 nt, Artificial Sequence
  Synthetic
auauuuauuuuuaauauacg

SEQ ID NO: 805969 - RNA, 20 nt, Artificial Sequence
  Synthetic
acuuuccaagcuauacuacg

SEQ ID NO: 805970 - RNA, 20 nt, Artificial Sequence
  Synthetic
aaaucuuaauauagccuacg

SEQ ID NO: 805971 - RNA, 20 nt, Artificial Sequence
  Synthetic
agcacuuugggaggccuacg

SEQ ID NO: 805972 - RNA, 20 nt, Artificial Sequence
  Synthetic
cuuuuuuccuuuugccuacg

SEQ ID NO: 805973 - RNA, 20 nt, Artificial Sequence
  Synthetic
cgccuguagucccagcuacg

SEQ ID NO: 805974 - RNA, 20 nt, Artificial Sequence
  Synthetic
auaccuguggaacaucuacg

SEQ ID NO: 805975 - RNA, 20 nt, Artificial Sequence
  Synthetic
uccucuuccaauugucuacg

SEQ ID NO: 805976 - RNA, 20 nt, Artificial Sequence
  Synthetic
aaaaugcagacucuucuacg

SEQ ID NO: 805977 - RNA, 20 nt, Artificial Sequence
  Synthetic
ccauucaggacacaaguacg

SEQ ID NO: 805978 - RNA, 20 nt, Artificial Sequence
  Synthetic
acauuugacucugaaguacg

SEQ ID NO: 805979 - RNA, 20 nt, Artificial Sequence
  Synthetic
auugaaauacugagaguacg

SEQ ID NO: 805980 - RNA, 20 nt, Artificial Sequence
  Synthetic
acauuggaugcaguuguacg

SEQ ID NO: 805981 - RNA, 20 nt, Artificial Sequence
  Synthetic
caaacauauaauacauuacg

SEQ ID NO: 805982 - RNA, 20 nt, Artificial Sequence
  Synthetic
aucuauuucaguucauuacg

SEQ ID NO: 805983 - RNA, 20 nt, Artificial Sequence
  Synthetic
caaugaauaaggagauuacg

SEQ ID NO: 805984 - RNA, 20 nt, Artificial Sequence
  Synthetic
cauuccagauugaacuuacg

SEQ ID NO: 805985 - RNA, 20 nt, Artificial Sequence
  Synthetic
uuuaaaauuuguggcuuacg

SEQ ID NO: 805986 - RNA, 20 nt, Artificial Sequence
  Synthetic
cgcaaaagaagacauuuacg

SEQ ID NO: 805987 - RNA, 20 nt, Artificial Sequence
  Synthetic
aguaggugcauauauuuacg

SEQ ID NO: 805988 - RNA, 20 nt, Artificial Sequence
  Synthetic
acauccuuuauguuuuuacg

SEQ ID NO: 805989 - RNA, 20 nt, Artificial Sequence
  Synthetic
acaugaaaaaccagaaaccg

SEQ ID NO: 805990 - RNA, 20 nt, Artificial Sequence
  Synthetic
ucaaaucauuuuagaaaccg

SEQ ID NO: 805991 - RNA, 20 nt, Artificial Sequence
  Synthetic
aucuuaucagagugaaaccg

SEQ ID NO: 805992 - RNA, 20 nt, Artificial Sequence
  Synthetic
aauacuucaucaguaaaccg

SEQ ID NO: 805993 - RNA, 20 nt, Artificial Sequence
  Synthetic
cagugaccuguuaggaaccg

SEQ ID NO: 805994 - RNA, 20 nt, Artificial Sequence
  Synthetic
agagacagaauaauuaaccg

SEQ ID NO: 805995 - RNA, 20 nt, Artificial Sequence
  Synthetic
aaaacaauuaggauuaaccg

SEQ ID NO: 805996 - RNA, 20 nt, Artificial Sequence
  Synthetic
acuuaaaaauguguuaaccg

SEQ ID NO: 805997 - RNA, 20 nt, Artificial Sequence
  Synthetic
aaggggaacaucacacaccg

SEQ ID NO: 805998 - RNA, 20 nt, Artificial Sequence
  Synthetic
augggugcagcaaaccaccg

SEQ ID NO: 805999 - RNA, 20 nt, Artificial Sequence
  Synthetic
uacauuuuauuucaccaccg

SEQ ID NO: 806000 - RNA, 20 nt, Artificial Sequence
  Synthetic
acccaggugcccucucaccg

SEQ ID NO: 806001 - RNA, 20 nt, Artificial Sequence
  Synthetic
aacucaauuauuuuucaccg

SEQ ID NO: 806002 - RNA, 20 nt, Artificial Sequence
  Synthetic
aaaaugaagcgacuugaccg

SEQ ID NO: 806003 - RNA, 20 nt, Artificial Sequence
  Synthetic
uacauuuggaagaaauaccg

SEQ ID NO: 806004 - RNA, 20 nt, Artificial Sequence
  Synthetic
uaugcgaacaacagauaccg

SEQ ID NO: 806005 - RNA, 20 nt, Artificial Sequence
  Synthetic
ccauuugaccugcuauaccg

SEQ ID NO: 806006 - RNA, 20 nt, Artificial Sequence
  Synthetic
agauugagggcucaguaccg

SEQ ID NO: 806007 - RNA, 20 nt, Artificial Sequence
  Synthetic
uuuuaagcaguucuuuaccg

SEQ ID NO: 806008 - RNA, 20 nt, Artificial Sequence
  Synthetic
ccugguggcguaggcacccg

SEQ ID NO: 806009 - RNA, 20 nt, Artificial Sequence
  Synthetic
cuccccaucuccccaccccg

SEQ ID NO: 806010 - RNA, 20 nt, Artificial Sequence
  Synthetic
uucagcugcagagcuccccg

SEQ ID NO: 806011 - RNA, 20 nt, Artificial Sequence
  Synthetic
ccacagcugccccuuccccg

SEQ ID NO: 806012 - RNA, 20 nt, Artificial Sequence
  Synthetic
cccuaccuccgcuuuccccg

SEQ ID NO: 806013 - RNA, 20 nt, Artificial Sequence
  Synthetic
cuauaugauuuuaaagcccg

SEQ ID NO: 806014 - RNA, 20 nt, Artificial Sequence
  Synthetic
cacuuaauuacagaagcccg

SEQ ID NO: 806015 - RNA, 20 nt, Artificial Sequence
  Synthetic
ugacaaacucuuccagcccg

SEQ ID NO: 806016 - RNA, 20 nt, Artificial Sequence
  Synthetic
agcaucucuggauaugcccg

SEQ ID NO: 806017 - RNA, 20 nt, Artificial Sequence
  Synthetic
acuggaagaaaggaaucccg

SEQ ID NO: 806018 - RNA, 20 nt, Artificial Sequence
  Synthetic
aagugcauaucuaacucccg

SEQ ID NO: 806019 - RNA, 20 nt, Artificial Sequence
  Synthetic
augacuucagaaggcucccg

SEQ ID NO: 806020 - RNA, 20 nt, Artificial Sequence
  Synthetic
uaccuucucuuauucucccg

SEQ ID NO: 806021 - RNA, 20 nt, Artificial Sequence
  Synthetic
cccccuuauggaaauucccg

SEQ ID NO: 806022 - RNA, 20 nt, Artificial Sequence
  Synthetic
aucacaugguguuuuucccg

SEQ ID NO: 806023 - RNA, 20 nt, Artificial Sequence
  Synthetic
uguaaaauaaauaaaagccg

SEQ ID NO: 806024 - RNA, 20 nt, Artificial Sequence
  Synthetic
auauuuuuaaaaagaagccg

SEQ ID NO: 806025 - RNA, 20 nt, Artificial Sequence
  Synthetic
uaaggaacuaguaagagccg

SEQ ID NO: 806026 - RNA, 20 nt, Artificial Sequence
  Synthetic
auagauacuaauuagagccg

SEQ ID NO: 806027 - RNA, 20 nt, Artificial Sequence
  Synthetic
cuuccacacuguccuagccg

SEQ ID NO: 806028 - RNA, 20 nt, Artificial Sequence
  Synthetic
cccagcacuuuggaaggccg

SEQ ID NO: 806029 - RNA, 20 nt, Artificial Sequence
  Synthetic
cccagcaauuugagaggccg

SEQ ID NO: 806030 - RNA, 20 nt, Artificial Sequence
  Synthetic
cccagcacuuugcgaggccg

SEQ ID NO: 806031 - RNA, 20 nt, Artificial Sequence
  Synthetic
cccagauacucaggaggccg

SEQ ID NO: 806032 - RNA, 20 nt, Artificial Sequence
  Synthetic
cucagcgcuucaggaggccg

SEQ ID NO: 806033 - RNA, 20 nt, Artificial Sequence
  Synthetic
cccagcacuuggggaggccg

SEQ ID NO: 806034 - RNA, 20 nt, Artificial Sequence
  Synthetic
ccagcacuuuggggaggccg

SEQ ID NO: 806035 - RNA, 20 nt, Artificial Sequence
  Synthetic
cccagcacucugggaggccg

SEQ ID NO: 806036 - RNA, 20 nt, Artificial Sequence
  Synthetic
cccagcugcuugggaggccg

SEQ ID NO: 806037 - RNA, 20 nt, Artificial Sequence
  Synthetic
aucagcaauuugggaggccg

SEQ ID NO: 806038 - RNA, 20 nt, Artificial Sequence
  Synthetic
cccagcacuuugggaggccg

SEQ ID NO: 806039 - RNA, 20 nt, Artificial Sequence
  Synthetic
ccuagcacuuugggaggccg

SEQ ID NO: 806040 - RNA, 20 nt, Artificial Sequence
  Synthetic
cccaggacuuugggaggccg

SEQ ID NO: 806041 - RNA, 20 nt, Artificial Sequence
  Synthetic
ccuaguacuuugggaggccg

SEQ ID NO: 806042 - RNA, 20 nt, Artificial Sequence
  Synthetic
ccaggugcuuugggaggccg

SEQ ID NO: 806043 - RNA, 20 nt, Artificial Sequence
  Synthetic
cucagcguuuugggaggccg

SEQ ID NO: 806044 - RNA, 20 nt, Artificial Sequence
  Synthetic
cccagcucuuugugaggccg

SEQ ID NO: 806045 - RNA, 20 nt, Artificial Sequence
  Synthetic
uauuuagucauggccggccg

SEQ ID NO: 806046 - RNA, 20 nt, Artificial Sequence
  Synthetic
cccaacacuuuggggggccg

SEQ ID NO: 806047 - RNA, 20 nt, Artificial Sequence
  Synthetic
ugauauauuacaugaugccg

SEQ ID NO: 806048 - RNA, 20 nt, Artificial Sequence
  Synthetic
cucugagggguuugcugccg

SEQ ID NO: 806049 - RNA, 20 nt, Artificial Sequence
  Synthetic
aacuacacgagaaguugccg

SEQ ID NO: 806050 - RNA, 20 nt, Artificial Sequence
  Synthetic
uccaaaggcacagcaauccg

SEQ ID NO: 806051 - RNA, 20 nt, Artificial Sequence
  Synthetic
aggagaaagauaggaauccg

SEQ ID NO: 806052 - RNA, 20 nt, Artificial Sequence
  Synthetic
aggugaagggaaauaauccg

SEQ ID NO: 806053 - RNA, 20 nt, Artificial Sequence
  Synthetic
ucaucuagaacuguaauccg

SEQ ID NO: 806054 - RNA, 20 nt, Artificial Sequence
  Synthetic
cucugaacuaaaagcauccg

SEQ ID NO: 806055 - RNA, 20 nt, Artificial Sequence
  Synthetic
uauuaguuuuaguuuauccg

SEQ ID NO: 806056 - RNA, 20 nt, Artificial Sequence
  Synthetic
caggcuguucuugaacuccg

SEQ ID NO: 806057 - RNA, 20 nt, Artificial Sequence
  Synthetic
acucucuguucuccacuccg

SEQ ID NO: 806058 - RNA, 20 nt, Artificial Sequence
  Synthetic
cagcaccauggacagcuccg

SEQ ID NO: 806059 - RNA, 20 nt, Artificial Sequence
  Synthetic
agcagugcugggaggcuccg

SEQ ID NO: 806060 - RNA, 20 nt, Artificial Sequence
  Synthetic
aaucuuuuauuaaaucuccg

SEQ ID NO: 806061 - RNA, 20 nt, Artificial Sequence
  Synthetic
uucccacaucuacuaguccg

SEQ ID NO: 806062 - RNA, 20 nt, Artificial Sequence
  Synthetic
acagucaccgcagagguccg

SEQ ID NO: 806063 - RNA, 20 nt, Artificial Sequence
  Synthetic
ccaaguaaagaugguguccg

SEQ ID NO: 806064 - RNA, 20 nt, Artificial Sequence
  Synthetic
auuauuugaaaaccauuccg

SEQ ID NO: 806065 - RNA, 20 nt, Artificial Sequence
  Synthetic
uuuaaccacuauuccuuccg

SEQ ID NO: 806066 - RNA, 20 nt, Artificial Sequence
  Synthetic
ccugaccccuugugcuuccg

SEQ ID NO: 806067 - RNA, 20 nt, Artificial Sequence
  Synthetic
aauuuuuauuuuaaguuccg

SEQ ID NO: 806068 - RNA, 20 nt, Artificial Sequence
  Synthetic
ccucagacccuuuguuuccg

SEQ ID NO: 806069 - RNA, 20 nt, Artificial Sequence
  Synthetic
uguggaagacaauuuuuccg

SEQ ID NO: 806070 - RNA, 20 nt, Artificial Sequence
  Synthetic
uuacagcauuuuuuuuuccg

SEQ ID NO: 806071 - RNA, 20 nt, Artificial Sequence
  Synthetic
uuuuuuuuuuuuuuuuuccg

SEQ ID NO: 806072 - RNA, 20 nt, Artificial Sequence
  Synthetic
uaacucugaccauaaaagcg

SEQ ID NO: 806073 - RNA, 20 nt, Artificial Sequence
  Synthetic
ucacacccaguaagaaagcg

SEQ ID NO: 806074 - RNA, 20 nt, Artificial Sequence
  Synthetic
cagcuuguugggagaaagcg

SEQ ID NO: 806075 - RNA, 20 nt, Artificial Sequence
  Synthetic
acuccuuacccacgaaagcg

SEQ ID NO: 806076 - RNA, 20 nt, Artificial Sequence
  Synthetic
aaaagcuuaucuugaaagcg

SEQ ID NO: 806077 - RNA, 20 nt, Artificial Sequence
  Synthetic
aauauagaaauaaagaagcg

SEQ ID NO: 806078 - RNA, 20 nt, Artificial Sequence
  Synthetic
uuuacaucuaagcagaagcg

SEQ ID NO: 806079 - RNA, 20 nt, Artificial Sequence
  Synthetic
cagaaaaugaaggggaagcg

SEQ ID NO: 806080 - RNA, 20 nt, Artificial Sequence
  Synthetic
cugcaacacagagauaagcg

SEQ ID NO: 806081 - RNA, 20 nt, Artificial Sequence
  Synthetic
aagaguacaacuccacagcg

SEQ ID NO: 806082 - RNA, 20 nt, Artificial Sequence
  Synthetic
cuggaacauugaguacagcg

SEQ ID NO: 806083 - RNA, 20 nt, Artificial Sequence
  Synthetic
uccauucucaauggucagcg

SEQ ID NO: 806084 - RNA, 20 nt, Artificial Sequence
  Synthetic
agagaaauccagguucagcg

SEQ ID NO: 806085 - RNA, 20 nt, Artificial Sequence
  Synthetic
ucaugcaugcaugcagagcg

SEQ ID NO: 806086 - RNA, 20 nt, Artificial Sequence
  Synthetic
aggugagauuccagagagcg

SEQ ID NO: 806087 - RNA, 20 nt, Artificial Sequence
  Synthetic
auggugagagagggagagcg

SEQ ID NO: 806088 - RNA, 20 nt, Artificial Sequence
  Synthetic
ucugaagcauuuggggagcg

SEQ ID NO: 806089 - RNA, 20 nt, Artificial Sequence
  Synthetic
uaguaugucuuuugggagcg

SEQ ID NO: 806090 - RNA, 20 nt, Artificial Sequence
  Synthetic
auacaaaaauuagcugagcg

SEQ ID NO: 806091 - RNA, 20 nt, Artificial Sequence
  Synthetic
aauauuuggguuauugagcg

SEQ ID NO: 806092 - RNA, 20 nt, Artificial Sequence
  Synthetic
cuuccucagcaguuugagcg

SEQ ID NO: 806093 - RNA, 20 nt, Artificial Sequence
  Synthetic
agaaaauacaaaaaguagcg

SEQ ID NO: 806094 - RNA, 20 nt, Artificial Sequence
  Synthetic
aaaauacaaaaaaauuagcg

SEQ ID NO: 806095 - RNA, 20 nt, Artificial Sequence
  Synthetic
acaccaugccaaucuuagcg

SEQ ID NO: 806096 - RNA, 20 nt, Artificial Sequence
  Synthetic
caaagucaggaaauuuagcg

SEQ ID NO: 806097 - RNA, 20 nt, Artificial Sequence
  Synthetic
cggaaguaaaauauuuagcg

SEQ ID NO: 806098 - RNA, 20 nt, Artificial Sequence
  Synthetic
cagucacccacaaucacgcg

SEQ ID NO: 806099 - RNA, 20 nt, Artificial Sequence
  Synthetic
acacaccgaggccugucgcg

SEQ ID NO: 806100 - RNA, 20 nt, Artificial Sequence
  Synthetic
cauucacaauagcaaaggcg

SEQ ID NO: 806101 - RNA, 20 nt, Artificial Sequence
  Synthetic
aaauggggucucggaaggcg

SEQ ID NO: 806102 - RNA, 20 nt, Artificial Sequence
  Synthetic
uuucucccauuuuacaggcg

SEQ ID NO: 806103 - RNA, 20 nt, Artificial Sequence
  Synthetic
caaaaucaauugaccaggcg

SEQ ID NO: 806104 - RNA, 20 nt, Artificial Sequence
  Synthetic
aaaaaaaaauuagccaggcg

SEQ ID NO: 806105 - RNA, 20 nt, Artificial Sequence
  Synthetic
caaaaaaaauuagccaggcg

SEQ ID NO: 806106 - RNA, 20 nt, Artificial Sequence
  Synthetic
uacaaaaaauuagccaggcg

SEQ ID NO: 806107 - RNA, 20 nt, Artificial Sequence
  Synthetic
uuuaaaaaauuagccaggcg

SEQ ID NO: 806108 - RNA, 20 nt, Artificial Sequence
  Synthetic
acacaaaaauuagccaggcg

SEQ ID NO: 806109 - RNA, 20 nt, Artificial Sequence
  Synthetic
auacaaaaauuagccaggcg

SEQ ID NO: 806110 - RNA, 20 nt, Artificial Sequence
  Synthetic
aauacaaaauuagccaggcg

SEQ ID NO: 806111 - RNA, 20 nt, Artificial Sequence
  Synthetic
aguacaaaauuagccaggcg

SEQ ID NO: 806112 - RNA, 20 nt, Artificial Sequence
  Synthetic
auaugaaaauuagccaggcg

SEQ ID NO: 806113 - RNA, 20 nt, Artificial Sequence
  Synthetic
uacuaacuaggggccaggcg

SEQ ID NO: 806114 - RNA, 20 nt, Artificial Sequence
  Synthetic
uucauaucaugggccaggcg

SEQ ID NO: 806115 - RNA, 20 nt, Artificial Sequence
  Synthetic
aaaauuaucuuggccaggcg

SEQ ID NO: 806116 - RNA, 20 nt, Artificial Sequence
  Synthetic
uaaaagaaguuggccaggcg

SEQ ID NO: 806117 - RNA, 20 nt, Artificial Sequence
  Synthetic
acacacaccauuuccaggcg

SEQ ID NO: 806118 - RNA, 20 nt, Artificial Sequence
  Synthetic
caggcagggaaucagaggcg

SEQ ID NO: 806119 - RNA, 20 nt, Artificial Sequence
  Synthetic
cguguguguguguagaggcg

SEQ ID NO: 806120 - RNA, 20 nt, Artificial Sequence
  Synthetic
augcaaacuccaaugaggcg

SEQ ID NO: 806121 - RNA, 20 nt, Artificial Sequence
  Synthetic
uacuuuuuuuucuugaggcg

SEQ ID NO: 806122 - RNA, 20 nt, Artificial Sequence
  Synthetic
uaccauucaggacauaggcg

SEQ ID NO: 806123 - RNA, 20 nt, Artificial Sequence
  Synthetic
cauacaaauuuuagccggcg

SEQ ID NO: 806124 - RNA, 20 nt, Artificial Sequence
  Synthetic
caaaaaaaauuagcagggcg

SEQ ID NO: 806125 - RNA, 20 nt, Artificial Sequence
  Synthetic
uuuaaaauagcagccgggcg

SEQ ID NO: 806126 - RNA, 20 nt, Artificial Sequence
  Synthetic
aaaaaaaaauuagccgggcg

SEQ ID NO: 806127 - RNA, 20 nt, Artificial Sequence
  Synthetic
acaaaaaaauuagccgggcg

SEQ ID NO: 806128 - RNA, 20 nt, Artificial Sequence
  Synthetic
cacaaaaaauuagccgggcg

SEQ ID NO: 806129 - RNA, 20 nt, Artificial Sequence
  Synthetic
uacaaaaaauuagccgggcg

SEQ ID NO: 806130 - RNA, 20 nt, Artificial Sequence
  Synthetic
uacacaaaauuagccgggcg

SEQ ID NO: 806131 - RNA, 20 nt, Artificial Sequence
  Synthetic
aauacaaaauuagccgggcg

SEQ ID NO: 806132 - RNA, 20 nt, Artificial Sequence
  Synthetic
auaaauguacaggccgggcg

SEQ ID NO: 806133 - RNA, 20 nt, Artificial Sequence
  Synthetic
aagaauggugaggccgggcg

SEQ ID NO: 806134 - RNA, 20 nt, Artificial Sequence
  Synthetic
aagagcauugcggccgggcg

SEQ ID NO: 806135 - RNA, 20 nt, Artificial Sequence
  Synthetic
aauaacucaucggccgggcg

SEQ ID NO: 806136 - RNA, 20 nt, Artificial Sequence
  Synthetic
aacaguuacucggccgggcg

SEQ ID NO: 806137 - RNA, 20 nt, Artificial Sequence
  Synthetic
agaaaacucugggccgggcg

SEQ ID NO: 806138 - RNA, 20 nt, Artificial Sequence
  Synthetic
ugaaucacucuggccgggcg

SEQ ID NO: 806139 - RNA, 20 nt, Artificial Sequence
  Synthetic
aacauguuuuuggccgggcg

SEQ ID NO: 806140 - RNA, 20 nt, Artificial Sequence
  Synthetic
auacaaaaauuauucgggcg

SEQ ID NO: 806141 - RNA, 20 nt, Artificial Sequence
  Synthetic
aggauuuggagcuaggggcg

SEQ ID NO: 806142 - RNA, 20 nt, Artificial Sequence
  Synthetic
acaaaaaaauuagcggggcg

SEQ ID NO: 806143 - RNA, 20 nt, Artificial Sequence
  Synthetic
ugguugucacauugggggcg

SEQ ID NO: 806144 - RNA, 20 nt, Artificial Sequence
  Synthetic
uacaaguuugcgacugggcg

SEQ ID NO: 806145 - RNA, 20 nt, Artificial Sequence
  Synthetic
uuacaaaaaucagcugggcg

SEQ ID NO: 806146 - RNA, 20 nt, Artificial Sequence
  Synthetic
uaccaaaaacuagcugggcg

SEQ ID NO: 806147 - RNA, 20 nt, Artificial Sequence
  Synthetic
uacaaaaaauuagcugggcg

SEQ ID NO: 806148 - RNA, 20 nt, Artificial Sequence
  Synthetic
auacaaaaauuagcugggcg

SEQ ID NO: 806149 - RNA, 20 nt, Artificial Sequence
  Synthetic
auaguaaaauuagcugggcg

SEQ ID NO: 806150 - RNA, 20 nt, Artificial Sequence
  Synthetic
ugacugucucaggcugggcg

SEQ ID NO: 806151 - RNA, 20 nt, Artificial Sequence
  Synthetic
aaaauuuuggaggcugggcg

SEQ ID NO: 806152 - RNA, 20 nt, Artificial Sequence
  Synthetic
uucauuauuuaggcugggcg

SEQ ID NO: 806153 - RNA, 20 nt, Artificial Sequence
  Synthetic
agaguaaaaucggcugggcg

SEQ ID NO: 806154 - RNA, 20 nt, Artificial Sequence
  Synthetic
uaaaauucacgggcugggcg

SEQ ID NO: 806155 - RNA, 20 nt, Artificial Sequence
  Synthetic
aaauaguccuuggcugggcg

SEQ ID NO: 806156 - RNA, 20 nt, Artificial Sequence
  Synthetic
cugaacgcuuuggcugggcg

SEQ ID NO: 806157 - RNA, 20 nt, Artificial Sequence
  Synthetic
acacgagaaauaguugggcg

SEQ ID NO: 806158 - RNA, 20 nt, Artificial Sequence
  Synthetic
uucaagaugagauuugggcg

SEQ ID NO: 806159 - RNA, 20 nt, Artificial Sequence
  Synthetic
acucaccauucuacauggcg

SEQ ID NO: 806160 - RNA, 20 nt, Artificial Sequence
  Synthetic
aaaaaacaaauagccuggcg

SEQ ID NO: 806161 - RNA, 20 nt, Artificial Sequence
  Synthetic
auacaaaaacuagccuggcg

SEQ ID NO: 806162 - RNA, 20 nt, Artificial Sequence
  Synthetic
uauaaaaaauuagccuggcg

SEQ ID NO: 806163 - RNA, 20 nt, Artificial Sequence
  Synthetic
uaaggugucagccucuggcg

SEQ ID NO: 806164 - RNA, 20 nt, Artificial Sequence
  Synthetic
cauuccugguugggguggcg

SEQ ID NO: 806165 - RNA, 20 nt, Artificial Sequence
  Synthetic
acuggaauaaaauauuggcg

SEQ ID NO: 806166 - RNA, 20 nt, Artificial Sequence
  Synthetic
cccuuuuccuuggcuuggcg

SEQ ID NO: 806167 - RNA, 20 nt, Artificial Sequence
  Synthetic
uuaacaagaggcucuuggcg

SEQ ID NO: 806168 - RNA, 20 nt, Artificial Sequence
  Synthetic
ccaugucagucaaaaaugcg

SEQ ID NO: 806169 - RNA, 20 nt, Artificial Sequence
  Synthetic
aaaugaaaugaaacaaugcg

SEQ ID NO: 806170 - RNA, 20 nt, Artificial Sequence
  Synthetic
aaaaaaaaauuagccaugcg

SEQ ID NO: 806171 - RNA, 20 nt, Artificial Sequence
  Synthetic
acaaauaccuaaugcaugcg

SEQ ID NO: 806172 - RNA, 20 nt, Artificial Sequence
  Synthetic
cauggucacaccuaacugcg

SEQ ID NO: 806173 - RNA, 20 nt, Artificial Sequence
  Synthetic
auuagagagugccuacugcg

SEQ ID NO: 806174 - RNA, 20 nt, Artificial Sequence
  Synthetic
ugggaccacuguuagcugcg

SEQ ID NO: 806175 - RNA, 20 nt, Artificial Sequence
  Synthetic
ucuugaauccagaugcugcg

SEQ ID NO: 806176 - RNA, 20 nt, Artificial Sequence
  Synthetic
auccucacaaaagcucugcg

SEQ ID NO: 806177 - RNA, 20 nt, Artificial Sequence
  Synthetic
caacuucuugccucucugcg

SEQ ID NO: 806178 - RNA, 20 nt, Artificial Sequence
  Synthetic
aaauaguuuuauauucugcg

SEQ ID NO: 806179 - RNA, 20 nt, Artificial Sequence
  Synthetic
ccucagccucccaaagugcg

SEQ ID NO: 806180 - RNA, 20 nt, Artificial Sequence
  Synthetic
ccuuggccucccaaagugcg

SEQ ID NO: 806181 - RNA, 20 nt, Artificial Sequence
  Synthetic
ccucagccuccgaaagugcg

SEQ ID NO: 806182 - RNA, 20 nt, Artificial Sequence
  Synthetic
cuuucagaacaacaagugcg

SEQ ID NO: 806183 - RNA, 20 nt, Artificial Sequence
  Synthetic
auacaaaaaugaccugugcg

SEQ ID NO: 806184 - RNA, 20 nt, Artificial Sequence
  Synthetic
aaagugcuuauggcauugcg

SEQ ID NO: 806185 - RNA, 20 nt, Artificial Sequence
  Synthetic
acacacacaaaagccuugcg

SEQ ID NO: 806186 - RNA, 20 nt, Artificial Sequence
  Synthetic
aggguuguuuugugguugcg

SEQ ID NO: 806187 - RNA, 20 nt, Artificial Sequence
  Synthetic
cugcuuuuaaagguguugcg

SEQ ID NO: 806188 - RNA, 20 nt, Artificial Sequence
  Synthetic
uauaaucccagcacuuugcg

SEQ ID NO: 806189 - RNA, 20 nt, Artificial Sequence
  Synthetic
uguaaucccagcacuuugcg

SEQ ID NO: 806190 - RNA, 20 nt, Artificial Sequence
  Synthetic
caggugaacugcauuuugcg

SEQ ID NO: 806191 - RNA, 20 nt, Artificial Sequence
  Synthetic
uuacauuuauagcaaaaucg

SEQ ID NO: 806192 - RNA, 20 nt, Artificial Sequence
  Synthetic
acaaacagagagccaaaucg

SEQ ID NO: 806193 - RNA, 20 nt, Artificial Sequence
  Synthetic
auucuaaaaguagccaaucg

SEQ ID NO: 806194 - RNA, 20 nt, Artificial Sequence
  Synthetic
uuuguuugcucauugaaucg

SEQ ID NO: 806195 - RNA, 20 nt, Artificial Sequence
  Synthetic
auugaccugaguuugaaucg

SEQ ID NO: 806196 - RNA, 20 nt, Artificial Sequence
  Synthetic
ccucaggaaacuuaccaucg

SEQ ID NO: 806197 - RNA, 20 nt, Artificial Sequence
  Synthetic
ucacugcaaccuccccaucg

SEQ ID NO: 806198 - RNA, 20 nt, Artificial Sequence
  Synthetic
cucauguguuuuuuccaucg

SEQ ID NO: 806199 - RNA, 20 nt, Artificial Sequence
  Synthetic
agugagcuaugauugcaucg

SEQ ID NO: 806200 - RNA, 20 nt, Artificial Sequence
  Synthetic
cucaacaucgucaaucaucg

SEQ ID NO: 806201 - RNA, 20 nt, Artificial Sequence
  Synthetic
auguuugguagaauucaucg

SEQ ID NO: 806202 - RNA, 20 nt, Artificial Sequence
  Synthetic
acacauuaaauguuucaucg

SEQ ID NO: 806203 - RNA, 20 nt, Artificial Sequence
  Synthetic
aguugaggaaacugagaucg

SEQ ID NO: 806204 - RNA, 20 nt, Artificial Sequence
  Synthetic
uaauaaccugccugagaucg

SEQ ID NO: 806205 - RNA, 20 nt, Artificial Sequence
  Synthetic
caaugccaaauacaugaucg

SEQ ID NO: 806206 - RNA, 20 nt, Artificial Sequence
  Synthetic
uuauuuucuguuuaugaucg

SEQ ID NO: 806207 - RNA, 20 nt, Artificial Sequence
  Synthetic
aaaggauugguaauuuaucg

SEQ ID NO: 806208 - RNA, 20 nt, Artificial Sequence
  Synthetic
aauacugaacuuugaacucg

SEQ ID NO: 806209 - RNA, 20 nt, Artificial Sequence
  Synthetic
ugaagugggcggaacacucg

SEQ ID NO: 806210 - RNA, 20 nt, Artificial Sequence
  Synthetic
uauagcuucacaaucacucg

SEQ ID NO: 806211 - RNA, 20 nt, Artificial Sequence
  Synthetic
uuugaaucugcuuucacucg

SEQ ID NO: 806212 - RNA, 20 nt, Artificial Sequence
  Synthetic
auguugugggaaggaccucg

SEQ ID NO: 806213 - RNA, 20 nt, Artificial Sequence
  Synthetic
uggcgugagaugguaccucg

SEQ ID NO: 806214 - RNA, 20 nt, Artificial Sequence
  Synthetic
ucacugcaaccuccgccucg

SEQ ID NO: 806215 - RNA, 20 nt, Artificial Sequence
  Synthetic
ucacugcaaucucugccucg

SEQ ID NO: 806216 - RNA, 20 nt, Artificial Sequence
  Synthetic
uccccagcccccaauccucg

SEQ ID NO: 806217 - RNA, 20 nt, Artificial Sequence
  Synthetic
acauuugagcaaaguccucg

SEQ ID NO: 806218 - RNA, 20 nt, Artificial Sequence
  Synthetic
uugcucaaggcaaguccucg

SEQ ID NO: 806219 - RNA, 20 nt, Artificial Sequence
  Synthetic
ucuguauuuugaauuccucg

SEQ ID NO: 806220 - RNA, 20 nt, Artificial Sequence
  Synthetic
aucaagagaucuggagcucg

SEQ ID NO: 806221 - RNA, 20 nt, Artificial Sequence
  Synthetic
acuuuguaaauacuagcucg

SEQ ID NO: 806222 - RNA, 20 nt, Artificial Sequence
  Synthetic
aguggcacaaucauggcucg

SEQ ID NO: 806223 - RNA, 20 nt, Artificial Sequence
  Synthetic
uucuucacauauaaaucucg

SEQ ID NO: 806224 - RNA, 20 nt, Artificial Sequence
  Synthetic
aaaacaaagcugaagucucg

SEQ ID NO: 806225 - RNA, 20 nt, Artificial Sequence
  Synthetic
uauuuuuacaacuggucucg

SEQ ID NO: 806226 - RNA, 20 nt, Artificial Sequence
  Synthetic
ucuuggaguugcucuucucg

SEQ ID NO: 806227 - RNA, 20 nt, Artificial Sequence
  Synthetic
uuaguaguaaauauuucucg

SEQ ID NO: 806228 - RNA, 20 nt, Artificial Sequence
  Synthetic
uuauuucuuuaaguuucucg

SEQ ID NO: 806229 - RNA, 20 nt, Artificial Sequence
  Synthetic
aaauaaaaucuauaaagucg

SEQ ID NO: 806230 - RNA, 20 nt, Artificial Sequence
  Synthetic
cacgugaacccaggaagucg

SEQ ID NO: 806231 - RNA, 20 nt, Artificial Sequence
  Synthetic
cuucucuuaaauuccagucg

SEQ ID NO: 806232 - RNA, 20 nt, Artificial Sequence
  Synthetic
cuucgggaagcuuccagucg

SEQ ID NO: 806233 - RNA, 20 nt, Artificial Sequence
  Synthetic
aagggauguccuggcagucg

SEQ ID NO: 806234 - RNA, 20 nt, Artificial Sequence
  Synthetic
aucugagucaggaagagucg

SEQ ID NO: 806235 - RNA, 20 nt, Artificial Sequence
  Synthetic
agaauuuuccaagggagucg

SEQ ID NO: 806236 - RNA, 20 nt, Artificial Sequence
  Synthetic
uguaugggggccagacgucg

SEQ ID NO: 806237 - RNA, 20 nt, Artificial Sequence
  Synthetic
ccugaggaugggaagggucg

SEQ ID NO: 806238 - RNA, 20 nt, Artificial Sequence
  Synthetic
auuuuagguaagaggggucg

SEQ ID NO: 806239 - RNA, 20 nt, Artificial Sequence
  Synthetic
uggggacugugguggggucg

SEQ ID NO: 806240 - RNA, 20 nt, Artificial Sequence
  Synthetic
cagggccuguuguggggucg

SEQ ID NO: 806241 - RNA, 20 nt, Artificial Sequence
  Synthetic
agcucucuggggaugggucg

SEQ ID NO: 806242 - RNA, 20 nt, Artificial Sequence
  Synthetic
ucuagaaaacaacuaugucg

SEQ ID NO: 806243 - RNA, 20 nt, Artificial Sequence
  Synthetic
ucucucuagccccacugucg

SEQ ID NO: 806244 - RNA, 20 nt, Artificial Sequence
  Synthetic
acaaagaagauucacugucg

SEQ ID NO: 806245 - RNA, 20 nt, Artificial Sequence
  Synthetic
acacacacugaggccugucg

SEQ ID NO: 806246 - RNA, 20 nt, Artificial Sequence
  Synthetic
ucacacaccagggccugucg

SEQ ID NO: 806247 - RNA, 20 nt, Artificial Sequence
  Synthetic
ucacacaccggggccugucg

SEQ ID NO: 806248 - RNA, 20 nt, Artificial Sequence
  Synthetic
ucacacacuggggccugucg

SEQ ID NO: 806249 - RNA, 20 nt, Artificial Sequence
  Synthetic
aaaaguagauuuuggugucg

SEQ ID NO: 806250 - RNA, 20 nt, Artificial Sequence
  Synthetic
uaaacaccugccaugugucg

SEQ ID NO: 806251 - RNA, 20 nt, Artificial Sequence
  Synthetic
uugggagaguguaugugucg

SEQ ID NO: 806252 - RNA, 20 nt, Artificial Sequence
  Synthetic
uucugagugcuugcuugucg

SEQ ID NO: 806253 - RNA, 20 nt, Artificial Sequence
  Synthetic
agugguguugaccuuugucg

SEQ ID NO: 806254 - RNA, 20 nt, Artificial Sequence
  Synthetic
aaauuauuagaaugaauucg

SEQ ID NO: 806255 - RNA, 20 nt, Artificial Sequence
  Synthetic
aauuguagcauugagauucg

SEQ ID NO: 806256 - RNA, 20 nt, Artificial Sequence
  Synthetic
aggugaaguaaugugauucg

SEQ ID NO: 806257 - RNA, 20 nt, Artificial Sequence
  Synthetic
agaugucauauaaauauucg

SEQ ID NO: 806258 - RNA, 20 nt, Artificial Sequence
  Synthetic
agguuuuagacuuggcuucg

SEQ ID NO: 806259 - RNA, 20 nt, Artificial Sequence
  Synthetic
uaaaacaaaacauugcuucg

SEQ ID NO: 806260 - RNA, 20 nt, Artificial Sequence
  Synthetic
ucuggggauuaacaucuucg

SEQ ID NO: 806261 - RNA, 20 nt, Artificial Sequence
  Synthetic
cugguuuuuccucaucuucg

SEQ ID NO: 806262 - RNA, 20 nt, Artificial Sequence
  Synthetic
agguaauuaauauaucuucg

SEQ ID NO: 806263 - RNA, 20 nt, Artificial Sequence
  Synthetic
ugcuugagcccaggaguucg

SEQ ID NO: 806264 - RNA, 20 nt, Artificial Sequence
  Synthetic
cucuugggcccaggaguucg

SEQ ID NO: 806265 - RNA, 20 nt, Artificial Sequence
  Synthetic
ucaaacagugugaggguucg

SEQ ID NO: 806266 - RNA, 20 nt, Artificial Sequence
  Synthetic
cagccucaauaaaauguucg

SEQ ID NO: 806267 - RNA, 20 nt, Artificial Sequence
  Synthetic
uauauuaucugucauguucg

SEQ ID NO: 806268 - RNA, 20 nt, Artificial Sequence
  Synthetic
agauuucagccacuuguucg

SEQ ID NO: 806269 - RNA, 20 nt, Artificial Sequence
  Synthetic
cccccaccacuaccauuucg

SEQ ID NO: 806270 - RNA, 20 nt, Artificial Sequence
  Synthetic
uuucccugaguaucauuucg

SEQ ID NO: 806271 - RNA, 20 nt, Artificial Sequence
  Synthetic
uuccuuggcuucugauuucg

SEQ ID NO: 806272 - RNA, 20 nt, Artificial Sequence
  Synthetic
aauggcagauuuugauuucg

SEQ ID NO: 806273 - RNA, 20 nt, Artificial Sequence
  Synthetic
aaaaaaauuguuaacuuucg

SEQ ID NO: 806274 - RNA, 20 nt, Artificial Sequence
  Synthetic
agugacaaaacaaucuuucg

SEQ ID NO: 806275 - RNA, 20 nt, Artificial Sequence
  Synthetic
ugucuuuuagggaaguuucg

SEQ ID NO: 806276 - RNA, 20 nt, Artificial Sequence
  Synthetic
aggaggcaaaaaugguuucg

SEQ ID NO: 806277 - RNA, 20 nt, Artificial Sequence
  Synthetic
uuuaggaaucgauuguuucg

SEQ ID NO: 806278 - RNA, 20 nt, Artificial Sequence
  Synthetic
auaugauuuucuucuuuucg

SEQ ID NO: 806279 - RNA, 20 nt, Artificial Sequence
  Synthetic
ugaggccacuuuguuuuucg

SEQ ID NO: 806280 - RNA, 20 nt, Artificial Sequence
  Synthetic
uuuucugggaaauuuuuucg

SEQ ID NO: 806281 - RNA, 20 nt, Artificial Sequence
  Synthetic
aaaagaagguccaaaaaagg

SEQ ID NO: 806282 - RNA, 20 nt, Artificial Sequence
  Synthetic
uguguuaaaugccaaaaagg

SEQ ID NO: 806283 - RNA, 20 nt, Artificial Sequence
  Synthetic
agaaaaugggcucaaaaagg

SEQ ID NO: 806284 - RNA, 20 nt, Artificial Sequence
  Synthetic
caagcaaguauagaaaaagg

SEQ ID NO: 806285 - RNA, 20 nt, Artificial Sequence
  Synthetic
aggguaaaaaaggaaaaagg

SEQ ID NO: 806286 - RNA, 20 nt, Artificial Sequence
  Synthetic
uauaguauuauugaaaaagg

SEQ ID NO: 806287 - RNA, 20 nt, Artificial Sequence
  Synthetic
uuaaauacuuuugaaaaagg

SEQ ID NO: 806288 - RNA, 20 nt, Artificial Sequence
  Synthetic
uuuccaaauagcuaaaaagg

SEQ ID NO: 806289 - RNA, 20 nt, Artificial Sequence
  Synthetic
uuuagggaauauccaaaagg

SEQ ID NO: 806290 - RNA, 20 nt, Artificial Sequence
  Synthetic
auauuuuugagagcaaaagg

SEQ ID NO: 806291 - RNA, 20 nt, Artificial Sequence
  Synthetic
aaggacaugccaucaaaagg

SEQ ID NO: 806292 - RNA, 20 nt, Artificial Sequence
  Synthetic
uacauacucaaaagaaaagg

SEQ ID NO: 806293 - RNA, 20 nt, Artificial Sequence
  Synthetic
uggacuggauaaagaaaagg

SEQ ID NO: 806294 - RNA, 20 nt, Artificial Sequence
  Synthetic
aacugaagacacagaaaagg

SEQ ID NO: 806295 - RNA, 20 nt, Artificial Sequence
  Synthetic
ucacuuagauauagaaaagg

SEQ ID NO: 806296 - RNA, 20 nt, Artificial Sequence
  Synthetic
uauauuuugauuagaaaagg

SEQ ID NO: 806297 - RNA, 20 nt, Artificial Sequence
  Synthetic
uauaauaaagaaggaaaagg

SEQ ID NO: 806298 - RNA, 20 nt, Artificial Sequence
  Synthetic
uggaaaagaugaggaaaagg

SEQ ID NO: 806299 - RNA, 20 nt, Artificial Sequence
  Synthetic
aagauuggagggggaaaagg

SEQ ID NO: 806300 - RNA, 20 nt, Artificial Sequence
  Synthetic
ucacuacauuggggaaaagg

SEQ ID NO: 806301 - RNA, 20 nt, Artificial Sequence
  Synthetic
caagaauuuuggggaaaagg

SEQ ID NO: 806302 - RNA, 20 nt, Artificial Sequence
  Synthetic
aaaaggucuuacugaaaagg

SEQ ID NO: 806303 - RNA, 20 nt, Artificial Sequence
  Synthetic
uuucacaaaaagugaaaagg

SEQ ID NO: 806304 - RNA, 20 nt, Artificial Sequence
  Synthetic
cuuuuuuucuaaauaaaagg

SEQ ID NO: 806305 - RNA, 20 nt, Artificial Sequence
  Synthetic
caaagcaaggcaauaaaagg

SEQ ID NO: 806306 - RNA, 20 nt, Artificial Sequence
  Synthetic
augguagagaacauaaaagg

SEQ ID NO: 806307 - RNA, 20 nt, Artificial Sequence
  Synthetic
aaggucaccaagcuaaaagg

SEQ ID NO: 806308 - RNA, 20 nt, Artificial Sequence
  Synthetic
accauagaaauuuuaaaagg

SEQ ID NO: 806309 - RNA, 20 nt, Artificial Sequence
  Synthetic
caauauagcagaaacaaagg

SEQ ID NO: 806310 - RNA, 20 nt, Artificial Sequence
  Synthetic
uuauucuuuuuaaacaaagg

SEQ ID NO: 806311 - RNA, 20 nt, Artificial Sequence
  Synthetic
aagccacucucccacaaagg

SEQ ID NO: 806312 - RNA, 20 nt, Artificial Sequence
  Synthetic
uauccuucucugcacaaagg

SEQ ID NO: 806313 - RNA, 20 nt, Artificial Sequence
  Synthetic
uauaaauaccuauacaaagg

SEQ ID NO: 806314 - RNA, 20 nt, Artificial Sequence
  Synthetic
acugaugguugcuacaaagg

SEQ ID NO: 806315 - RNA, 20 nt, Artificial Sequence
  Synthetic
cagauucauuugaccaaagg

SEQ ID NO: 806316 - RNA, 20 nt, Artificial Sequence
  Synthetic
uguggagauacagccaaagg

SEQ ID NO: 806317 - RNA, 20 nt, Artificial Sequence
  Synthetic
agugucuugguugccaaagg

SEQ ID NO: 806318 - RNA, 20 nt, Artificial Sequence
  Synthetic
ccugagucauaaagcaaagg

SEQ ID NO: 806319 - RNA, 20 nt, Artificial Sequence
  Synthetic
auauucccauuuagcaaagg

SEQ ID NO: 806320 - RNA, 20 nt, Artificial Sequence
  Synthetic
uggucuccacagggcaaagg

SEQ ID NO: 806321 - RNA, 20 nt, Artificial Sequence
  Synthetic
acucacaugcauggcaaagg

SEQ ID NO: 806322 - RNA, 20 nt, Artificial Sequence
  Synthetic
aaaaguguagccugcaaagg

SEQ ID NO: 806323 - RNA, 20 nt, Artificial Sequence
  Synthetic
ucacugaggugcugcaaagg

SEQ ID NO: 806324 - RNA, 20 nt, Artificial Sequence
  Synthetic
agaaggauuagagucaaagg

SEQ ID NO: 806325 - RNA, 20 nt, Artificial Sequence
  Synthetic
uuuaucuauaaauucaaagg

SEQ ID NO: 806326 - RNA, 20 nt, Artificial Sequence
  Synthetic
cacauuggcucauucaaagg

SEQ ID NO: 806327 - RNA, 20 nt, Artificial Sequence
  Synthetic
aggaaaacuauauucaaagg

SEQ ID NO: 806328 - RNA, 20 nt, Artificial Sequence
  Synthetic
cuuuucagaaguuucaaagg

SEQ ID NO: 806329 - RNA, 20 nt, Artificial Sequence
  Synthetic
uuugaacagaagcagaaagg

SEQ ID NO: 806330 - RNA, 20 nt, Artificial Sequence
  Synthetic
ugaugaugaaaagagaaagg

SEQ ID NO: 806331 - RNA, 20 nt, Artificial Sequence
  Synthetic
uaugagacaauggagaaagg

SEQ ID NO: 806332 - RNA, 20 nt, Artificial Sequence
  Synthetic
uaagggcccauggagaaagg

SEQ ID NO: 806333 - RNA, 20 nt, Artificial Sequence
  Synthetic
aggaaugggccugagaaagg

SEQ ID NO: 806334 - RNA, 20 nt, Artificial Sequence
  Synthetic
cuaauagaaguuuagaaagg

SEQ ID NO: 806335 - RNA, 20 nt, Artificial Sequence
  Synthetic
auagaaggggaaaggaaagg

SEQ ID NO: 806336 - RNA, 20 nt, Artificial Sequence
  Synthetic
acuguagggaacaggaaagg

SEQ ID NO: 806337 - RNA, 20 nt, Artificial Sequence
  Synthetic
aaaagaggagugaggaaagg

SEQ ID NO: 806338 - RNA, 20 nt, Artificial Sequence
  Synthetic
agagguaauuauaggaaagg

SEQ ID NO: 806339 - RNA, 20 nt, Artificial Sequence
  Synthetic
uugguuguuaugaugaaagg

SEQ ID NO: 806340 - RNA, 20 nt, Artificial Sequence
  Synthetic
aguuucaaaucacugaaagg

SEQ ID NO: 806341 - RNA, 20 nt, Artificial Sequence
  Synthetic
cccaaaccuaugcugaaagg

SEQ ID NO: 806342 - RNA, 20 nt, Artificial Sequence
  Synthetic
cguaacauaaaagugaaagg

SEQ ID NO: 806343 - RNA, 20 nt, Artificial Sequence
  Synthetic
auaguguuacaagugaaagg

SEQ ID NO: 806344 - RNA, 20 nt, Artificial Sequence
  Synthetic
uuacuucaucucgugaaagg

SEQ ID NO: 806345 - RNA, 20 nt, Artificial Sequence
  Synthetic
aacaucuaaguuaauaaagg

SEQ ID NO: 806346 - RNA, 20 nt, Artificial Sequence
  Synthetic
aagcaacuggaucauaaagg

SEQ ID NO: 806347 - RNA, 20 nt, Artificial Sequence
  Synthetic
cuuuaugauguucauaaagg

SEQ ID NO: 806348 - RNA, 20 nt, Artificial Sequence
  Synthetic
uaauaggaguuucauaaagg

SEQ ID NO: 806349 - RNA, 20 nt, Artificial Sequence
  Synthetic
uuaagaaauaucgauaaagg

SEQ ID NO: 806350 - RNA, 20 nt, Artificial Sequence
  Synthetic
uaauaacaauuuuauaaagg

SEQ ID NO: 806351 - RNA, 20 nt, Artificial Sequence
  Synthetic
auuuucucaacaaguaaagg

SEQ ID NO: 806352 - RNA, 20 nt, Artificial Sequence
  Synthetic
agugcaggauggaguaaagg

SEQ ID NO: 806353 - RNA, 20 nt, Artificial Sequence
  Synthetic
uuuucaaguuggaguaaagg

SEQ ID NO: 806354 - RNA, 20 nt, Artificial Sequence
  Synthetic
agaugguagagggguaaagg

SEQ ID NO: 806355 - RNA, 20 nt, Artificial Sequence
  Synthetic
auggcaauccaauguaaagg

SEQ ID NO: 806356 - RNA, 20 nt, Artificial Sequence
  Synthetic
uucuugccaccuuguaaagg

SEQ ID NO: 806357 - RNA, 20 nt, Artificial Sequence
  Synthetic
acaacuuuuuuuuguaaagg

SEQ ID NO: 806358 - RNA, 20 nt, Artificial Sequence
  Synthetic
caagaaacuuuccuuaaagg

SEQ ID NO: 806359 - RNA, 20 nt, Artificial Sequence
  Synthetic
acuguuacagcucuuaaagg

SEQ ID NO: 806360 - RNA, 20 nt, Artificial Sequence
  Synthetic
ucagaggguaauguuaaagg

SEQ ID NO: 806361 - RNA, 20 nt, Artificial Sequence
  Synthetic
aggacacugaaguuuaaagg

SEQ ID NO: 806362 - RNA, 20 nt, Artificial Sequence
  Synthetic
uuuuucaagcauuuuaaagg

SEQ ID NO: 806363 - RNA, 20 nt, Artificial Sequence
  Synthetic
uaagcuuuuuuuuuuaaagg

SEQ ID NO: 806364 - RNA, 20 nt, Artificial Sequence
  Synthetic
aaauaaggagagaaacaagg

SEQ ID NO: 806365 - RNA, 20 nt, Artificial Sequence
  Synthetic
cccccccccccccaacaagg

SEQ ID NO: 806366 - RNA, 20 nt, Artificial Sequence
  Synthetic
cucauaaaaagagaacaagg

SEQ ID NO: 806367 - RNA, 20 nt, Artificial Sequence
  Synthetic
aauauaguuuaugaacaagg

SEQ ID NO: 806368 - RNA, 20 nt, Artificial Sequence
  Synthetic
aguggagaguuauaacaagg

SEQ ID NO: 806369 - RNA, 20 nt, Artificial Sequence
  Synthetic
ucguuuuaauucacacaagg

SEQ ID NO: 806370 - RNA, 20 nt, Artificial Sequence
  Synthetic
caaaguugucaaccacaagg

SEQ ID NO: 806371 - RNA, 20 nt, Artificial Sequence
  Synthetic
uccugagacuucccacaagg

SEQ ID NO: 806372 - RNA, 20 nt, Artificial Sequence
  Synthetic
auuucgguauuuggacaagg

SEQ ID NO: 806373 - RNA, 20 nt, Artificial Sequence
  Synthetic
uucacccuaaauugacaagg

SEQ ID NO: 806374 - RNA, 20 nt, Artificial Sequence
  Synthetic
ucauauucuguaguacaagg

SEQ ID NO: 806375 - RNA, 20 nt, Artificial Sequence
  Synthetic
auucuaccagagguacaagg

SEQ ID NO: 806376 - RNA, 20 nt, Artificial Sequence
  Synthetic
aaggcaccuccuuuacaagg

SEQ ID NO: 806377 - RNA, 20 nt, Artificial Sequence
  Synthetic
uauuguucugggaaccaagg

SEQ ID NO: 806378 - RNA, 20 nt, Artificial Sequence
  Synthetic
ccuugcaugcuacaccaagg

SEQ ID NO: 806379 - RNA, 20 nt, Artificial Sequence
  Synthetic
agcacuuugagagaccaagg

SEQ ID NO: 806380 - RNA, 20 nt, Artificial Sequence
  Synthetic
aagaaagaauucgaccaagg

SEQ ID NO: 806381 - RNA, 20 nt, Artificial Sequence
  Synthetic
cacuuggguaaaacccaagg

SEQ ID NO: 806382 - RNA, 20 nt, Artificial Sequence
  Synthetic
aauuuaguuaucagccaagg

SEQ ID NO: 806383 - RNA, 20 nt, Artificial Sequence
  Synthetic
agcacguugucaggccaagg

SEQ ID NO: 806384 - RNA, 20 nt, Artificial Sequence
  Synthetic
agcacuuagggaggccaagg

SEQ ID NO: 806385 - RNA, 20 nt, Artificial Sequence
  Synthetic
agcacuucgggaggccaagg

SEQ ID NO: 806386 - RNA, 20 nt, Artificial Sequence
  Synthetic
agcacugugggaggccaagg

SEQ ID NO: 806387 - RNA, 20 nt, Artificial Sequence
  Synthetic
agcacuuugggaggccaagg

SEQ ID NO: 806388 - RNA, 20 nt, Artificial Sequence
  Synthetic
aggacuuugggaggccaagg

SEQ ID NO: 806389 - RNA, 20 nt, Artificial Sequence
  Synthetic
agcauuuuuggaggccaagg

SEQ ID NO: 806390 - RNA, 20 nt, Artificial Sequence
  Synthetic
cucauggcaacuggccaagg

SEQ ID NO: 806391 - RNA, 20 nt, Artificial Sequence
  Synthetic
aauaauuuuucuugccaagg

SEQ ID NO: 806392 - RNA, 20 nt, Artificial Sequence
  Synthetic
ucuuugggaaugauccaagg

SEQ ID NO: 806393 - RNA, 20 nt, Artificial Sequence
  Synthetic
uguauacugagucuccaagg

SEQ ID NO: 806394 - RNA, 20 nt, Artificial Sequence
  Synthetic
agcacuuugggaguccaagg

SEQ ID NO: 806395 - RNA, 20 nt, Artificial Sequence
  Synthetic
aggacuuugggaguccaagg

SEQ ID NO: 806396 - RNA, 20 nt, Artificial Sequence
  Synthetic
agcccaggaugaguccaagg

SEQ ID NO: 806397 - RNA, 20 nt, Artificial Sequence
  Synthetic
uuuuuuuuuuuuuuccaagg

SEQ ID NO: 806398 - RNA, 20 nt, Artificial Sequence
  Synthetic
uucucaccugauaagcaagg

SEQ ID NO: 806399 - RNA, 20 nt, Artificial Sequence
  Synthetic
aaagaacuuacggagcaagg

SEQ ID NO: 806400 - RNA, 20 nt, Artificial Sequence
  Synthetic
aaucuuggcagaaggcaagg

SEQ ID NO: 806401 - RNA, 20 nt, Artificial Sequence
  Synthetic
aacuauggcaccaggcaagg

SEQ ID NO: 806402 - RNA, 20 nt, Artificial Sequence
  Synthetic
auacacacagccaggcaagg

SEQ ID NO: 806403 - RNA, 20 nt, Artificial Sequence
  Synthetic
auuagaucugaagggcaagg

SEQ ID NO: 806404 - RNA, 20 nt, Artificial Sequence
  Synthetic
caggucacgcugaugcaagg

SEQ ID NO: 806405 - RNA, 20 nt, Artificial Sequence
  Synthetic
uguuagaggauggugcaagg

SEQ ID NO: 806406 - RNA, 20 nt, Artificial Sequence
  Synthetic
agucaugaccuugugcaagg

SEQ ID NO: 806407 - RNA, 20 nt, Artificial Sequence
  Synthetic
uaaaacuucccacaucaagg

SEQ ID NO: 806408 - RNA, 20 nt, Artificial Sequence
  Synthetic
uggucucagugggcucaagg

SEQ ID NO: 806409 - RNA, 20 nt, Artificial Sequence
  Synthetic
auguugauaauugcucaagg

SEQ ID NO: 806410 - RNA, 20 nt, Artificial Sequence
  Synthetic
cagaaacaggccagucaagg

SEQ ID NO: 806411 - RNA, 20 nt, Artificial Sequence
  Synthetic
ucauuuuccccaggucaagg

SEQ ID NO: 806412 - RNA, 20 nt, Artificial Sequence
  Synthetic
uugagcccaggaggucaagg

SEQ ID NO: 806413 - RNA, 20 nt, Artificial Sequence
  Synthetic
augaagacagagugucaagg

SEQ ID NO: 806414 - RNA, 20 nt, Artificial Sequence
  Synthetic
aaauauucauugugucaagg

SEQ ID NO: 806415 - RNA, 20 nt, Artificial Sequence
  Synthetic
auuuaauagaucauucaagg

SEQ ID NO: 806416 - RNA, 20 nt, Artificial Sequence
  Synthetic
auuuuccagaauuuucaagg

SEQ ID NO: 806417 - RNA, 20 nt, Artificial Sequence
  Synthetic
auuauguuuaauuuucaagg

SEQ ID NO: 806418 - RNA, 20 nt, Artificial Sequence
  Synthetic
cuaugugaaagaaaagaagg

SEQ ID NO: 806419 - RNA, 20 nt, Artificial Sequence
  Synthetic
uagggugaugccaaagaagg

SEQ ID NO: 806420 - RNA, 20 nt, Artificial Sequence
  Synthetic
uuuguaagcuauaaagaagg

SEQ ID NO: 806421 - RNA, 20 nt, Artificial Sequence
  Synthetic
uacccaaggggagaagaagg

SEQ ID NO: 806422 - RNA, 20 nt, Artificial Sequence
  Synthetic
aaguagucaaaggaagaagg

SEQ ID NO: 806423 - RNA, 20 nt, Artificial Sequence
  Synthetic
ccugccaccugugaagaagg

SEQ ID NO: 806424 - RNA, 20 nt, Artificial Sequence
  Synthetic
aggcauggagaauaagaagg

SEQ ID NO: 806425 - RNA, 20 nt, Artificial Sequence
  Synthetic
aucuguuugacuuaagaagg

SEQ ID NO: 806426 - RNA, 20 nt, Artificial Sequence
  Synthetic
agugagaucaacacagaagg

SEQ ID NO: 806427 - RNA, 20 nt, Artificial Sequence
  Synthetic
aacacugugauuacagaagg

SEQ ID NO: 806428 - RNA, 20 nt, Artificial Sequence
  Synthetic
ccaggaagagaaccagaagg

SEQ ID NO: 806429 - RNA, 20 nt, Artificial Sequence
  Synthetic
aaaauaugggcaccagaagg

SEQ ID NO: 806430 - RNA, 20 nt, Artificial Sequence
  Synthetic
ucauugaaaacugcagaagg

SEQ ID NO: 806431 - RNA, 20 nt, Artificial Sequence
  Synthetic
auaggccaagcugcagaagg

SEQ ID NO: 806432 - RNA, 20 nt, Artificial Sequence
  Synthetic
aagguugugauugcagaagg

SEQ ID NO: 806433 - RNA, 20 nt, Artificial Sequence
  Synthetic
cggaaguaggcuucagaagg

SEQ ID NO: 806434 - RNA, 20 nt, Artificial Sequence
  Synthetic
aguccuccuaagagagaagg

SEQ ID NO: 806435 - RNA, 20 nt, Artificial Sequence
  Synthetic
ucugcuuauaaaggagaagg

SEQ ID NO: 806436 - RNA, 20 nt, Artificial Sequence
  Synthetic
aaaggucaugaaggagaagg

SEQ ID NO: 806437 - RNA, 20 nt, Artificial Sequence
  Synthetic
aggggaaacacaggagaagg

SEQ ID NO: 806438 - RNA, 20 nt, Artificial Sequence
  Synthetic
acccagcuucacggagaagg

SEQ ID NO: 806439 - RNA, 20 nt, Artificial Sequence
  Synthetic
accugcuucaggggagaagg

SEQ ID NO: 806440 - RNA, 20 nt, Artificial Sequence
  Synthetic
cagcacgaccuuggagaagg

SEQ ID NO: 806441 - RNA, 20 nt, Artificial Sequence
  Synthetic
aucaaugaaacaugagaagg

SEQ ID NO: 806442 - RNA, 20 nt, Artificial Sequence
  Synthetic
auuagaacaaccauagaagg

SEQ ID NO: 806443 - RNA, 20 nt, Artificial Sequence
  Synthetic
cauuggggacuacuagaagg

SEQ ID NO: 806444 - RNA, 20 nt, Artificial Sequence
  Synthetic
ccuaucaaaaaccuagaagg

SEQ ID NO: 806445 - RNA, 20 nt, Artificial Sequence
  Synthetic
uuucucucaguccuagaagg

SEQ ID NO: 806446 - RNA, 20 nt, Artificial Sequence
  Synthetic
uauuguauaguauuagaagg

SEQ ID NO: 806447 - RNA, 20 nt, Artificial Sequence
  Synthetic
aaggugaugguauuagaagg

SEQ ID NO: 806448 - RNA, 20 nt, Artificial Sequence
  Synthetic
acugucuuuguacacgaagg

SEQ ID NO: 806449 - RNA, 20 nt, Artificial Sequence
  Synthetic
aaccaggggcugggcgaagg

SEQ ID NO: 806450 - RNA, 20 nt, Artificial Sequence
  Synthetic
aaauuaaaaaaaaaggaagg

SEQ ID NO: 806451 - RNA, 20 nt, Artificial Sequence
  Synthetic
accguaugaagcaaggaagg

SEQ ID NO: 806452 - RNA, 20 nt, Artificial Sequence
  Synthetic
aggcaguaagggaaggaagg

SEQ ID NO: 806453 - RNA, 20 nt, Artificial Sequence
  Synthetic
uauauagcugcacaggaagg

SEQ ID NO: 806454 - RNA, 20 nt, Artificial Sequence
  Synthetic
uguggagaucaccaggaagg

SEQ ID NO: 806455 - RNA, 20 nt, Artificial Sequence
  Synthetic
ugugaaagcagccaggaagg

SEQ ID NO: 806456 - RNA, 20 nt, Artificial Sequence
  Synthetic
uucacauggcagcaggaagg

SEQ ID NO: 806457 - RNA, 20 nt, Artificial Sequence
  Synthetic
uccuuuguagugcaggaagg

SEQ ID NO: 806458 - RNA, 20 nt, Artificial Sequence
  Synthetic
cuggggacuacagaggaagg

SEQ ID NO: 806459 - RNA, 20 nt, Artificial Sequence
  Synthetic
cuuugggaggccgaggaagg

SEQ ID NO: 806460 - RNA, 20 nt, Artificial Sequence
  Synthetic
caaaagucccuugaggaagg

SEQ ID NO: 806461 - RNA, 20 nt, Artificial Sequence
  Synthetic
uagaugaugcaauaggaagg

SEQ ID NO: 806462 - RNA, 20 nt, Artificial Sequence
  Synthetic
caucaggggagaagggaagg

SEQ ID NO: 806463 - RNA, 20 nt, Artificial Sequence
  Synthetic
uuuuauguauggagggaagg

SEQ ID NO: 806464 - RNA, 20 nt, Artificial Sequence
  Synthetic
agaaagagagugagggaagg

SEQ ID NO: 806465 - RNA, 20 nt, Artificial Sequence
  Synthetic
ugugagguagugagggaagg

SEQ ID NO: 806466 - RNA, 20 nt, Artificial Sequence
  Synthetic
ugaaagcaggauagggaagg

SEQ ID NO: 806467 - RNA, 20 nt, Artificial Sequence
  Synthetic
uccuagugagguagggaagg

SEQ ID NO: 806468 - RNA, 20 nt, Artificial Sequence
  Synthetic
uguuguggggugggggaagg

SEQ ID NO: 806469 - RNA, 20 nt, Artificial Sequence
  Synthetic
cuugaaauuaagugggaagg

SEQ ID NO: 806470 - RNA, 20 nt, Artificial Sequence
  Synthetic
agcaccuuaguuugggaagg

SEQ ID NO: 806471 - RNA, 20 nt, Artificial Sequence
  Synthetic
caugauuccaugauggaagg

SEQ ID NO: 806472 - RNA, 20 nt, Artificial Sequence
  Synthetic
aauuacuugaaacuggaagg

SEQ ID NO: 806473 - RNA, 20 nt, Artificial Sequence
  Synthetic
caagucagcccccuggaagg

SEQ ID NO: 806474 - RNA, 20 nt, Artificial Sequence
  Synthetic
cacaugcugaaucuggaagg

SEQ ID NO: 806475 - RNA, 20 nt, Artificial Sequence
  Synthetic
aauaaaguacaucuggaagg

SEQ ID NO: 806476 - RNA, 20 nt, Artificial Sequence
  Synthetic
acucuuccuacaguggaagg

SEQ ID NO: 806477 - RNA, 20 nt, Artificial Sequence
  Synthetic
ucugagcucugaguggaagg

SEQ ID NO: 806478 - RNA, 20 nt, Artificial Sequence
  Synthetic
ugugaacuuaucuuggaagg

SEQ ID NO: 806479 - RNA, 20 nt, Artificial Sequence
  Synthetic
ugucucuaggaguuggaagg

SEQ ID NO: 806480 - RNA, 20 nt, Artificial Sequence
  Synthetic
auaccuaucaauuuggaagg

SEQ ID NO: 806481 - RNA, 20 nt, Artificial Sequence
  Synthetic
ucuaaguuguauuuggaagg

SEQ ID NO: 806482 - RNA, 20 nt, Artificial Sequence
  Synthetic
ucuuuccuuucuuaugaagg

SEQ ID NO: 806483 - RNA, 20 nt, Artificial Sequence
  Synthetic
cauccaguaaagacugaagg

SEQ ID NO: 806484 - RNA, 20 nt, Artificial Sequence
  Synthetic
ugauaaagaaaugcugaagg

SEQ ID NO: 806485 - RNA, 20 nt, Artificial Sequence
  Synthetic
cuaagaaagaaaucugaagg

SEQ ID NO: 806486 - RNA, 20 nt, Artificial Sequence
  Synthetic
uauuuauaaggaagugaagg

SEQ ID NO: 806487 - RNA, 20 nt, Artificial Sequence
  Synthetic
acacaaaacuaccgugaagg

SEQ ID NO: 806488 - RNA, 20 nt, Artificial Sequence
  Synthetic
acuccacaaucuggugaagg

SEQ ID NO: 806489 - RNA, 20 nt, Artificial Sequence
  Synthetic
aagcuaaaagguggugaagg

SEQ ID NO: 806490 - RNA, 20 nt, Artificial Sequence
  Synthetic
caaaauucagaaugugaagg

SEQ ID NO: 806491 - RNA, 20 nt, Artificial Sequence
  Synthetic
aagggggaggggugugaagg

SEQ ID NO: 806492 - RNA, 20 nt, Artificial Sequence
  Synthetic
auagaaaaugauauugaagg

SEQ ID NO: 806493 - RNA, 20 nt, Artificial Sequence
  Synthetic
caaaaguaagcacuugaagg

SEQ ID NO: 806494 - RNA, 20 nt, Artificial Sequence
  Synthetic
aauuuaaucuaccuugaagg

SEQ ID NO: 806495 - RNA, 20 nt, Artificial Sequence
  Synthetic
caagagucuuucuuugaagg

SEQ ID NO: 806496 - RNA, 20 nt, Artificial Sequence
  Synthetic
auugugauguguuuugaagg

SEQ ID NO: 806497 - RNA, 20 nt, Artificial Sequence
  Synthetic
uucauugacuuuuuugaagg

SEQ ID NO: 806498 - RNA, 20 nt, Artificial Sequence
  Synthetic
caaacagaaaccaaauaagg

SEQ ID NO: 806499 - RNA, 20 nt, Artificial Sequence
  Synthetic
agagauaaaaagaaauaagg

SEQ ID NO: 806500 - RNA, 20 nt, Artificial Sequence
  Synthetic
aguucuaaguggaaauaagg

SEQ ID NO: 806501 - RNA, 20 nt, Artificial Sequence
  Synthetic
uggagcuuaaaggaauaagg

SEQ ID NO: 806502 - RNA, 20 nt, Artificial Sequence
  Synthetic
agggcagggcaugaauaagg

SEQ ID NO: 806503 - RNA, 20 nt, Artificial Sequence
  Synthetic
cagaaauguaaauaauaagg

SEQ ID NO: 806504 - RNA, 20 nt, Artificial Sequence
  Synthetic
uaugagagcauauaauaagg

SEQ ID NO: 806505 - RNA, 20 nt, Artificial Sequence
  Synthetic
agugaaauugagacauaagg

SEQ ID NO: 806506 - RNA, 20 nt, Artificial Sequence
  Synthetic
uuaguaaugucgacauaagg

SEQ ID NO: 806507 - RNA, 20 nt, Artificial Sequence
  Synthetic
ucacaggcuauuacauaagg

SEQ ID NO: 806508 - RNA, 20 nt, Artificial Sequence
  Synthetic
agacauuauuuuacauaagg

SEQ ID NO: 806509 - RNA, 20 nt, Artificial Sequence
  Synthetic
ucuugccccgaaccauaagg

SEQ ID NO: 806510 - RNA, 20 nt, Artificial Sequence
  Synthetic
aaucacuugaacccauaagg

SEQ ID NO: 806511 - RNA, 20 nt, Artificial Sequence
  Synthetic
aauaagucaggagcauaagg

SEQ ID NO: 806512 - RNA, 20 nt, Artificial Sequence
  Synthetic
aguacauuccacucauaagg

SEQ ID NO: 806513 - RNA, 20 nt, Artificial Sequence
  Synthetic
acauauauacuucuauaagg

SEQ ID NO: 806514 - RNA, 20 nt, Artificial Sequence
  Synthetic
uagaauguuuuucuauaagg

SEQ ID NO: 806515 - RNA, 20 nt, Artificial Sequence
  Synthetic
ucucaaagcacauuauaagg

SEQ ID NO: 806516 - RNA, 20 nt, Artificial Sequence
  Synthetic
agggggaggaauaacuaagg

SEQ ID NO: 806517 - RNA, 20 nt, Artificial Sequence
  Synthetic
cuuccuuucaaugacuaagg

SEQ ID NO: 806518 - RNA, 20 nt, Artificial Sequence
  Synthetic
agcacuuuggaaggcuaagg

SEQ ID NO: 806519 - RNA, 20 nt, Artificial Sequence
  Synthetic
acauuguagaauugcuaagg

SEQ ID NO: 806520 - RNA, 20 nt, Artificial Sequence
  Synthetic
aaaagccauauacucuaagg

SEQ ID NO: 806521 - RNA, 20 nt, Artificial Sequence
  Synthetic
cuggcugcaugauucuaagg

SEQ ID NO: 806522 - RNA, 20 nt, Artificial Sequence
  Synthetic
uucaauaaagcuagguaagg

SEQ ID NO: 806523 - RNA, 20 nt, Artificial Sequence
  Synthetic
uugauucaguggguguaagg

SEQ ID NO: 806524 - RNA, 20 nt, Artificial Sequence
  Synthetic
uuuuuguauaugguguaagg

SEQ ID NO: 806525 - RNA, 20 nt, Artificial Sequence
  Synthetic
ugacaauguauaaauuaagg

SEQ ID NO: 806526 - RNA, 20 nt, Artificial Sequence
  Synthetic
ucaaucauacuucauuaagg

SEQ ID NO: 806527 - RNA, 20 nt, Artificial Sequence
  Synthetic
uuaagaacagauucuuaagg

SEQ ID NO: 806528 - RNA, 20 nt, Artificial Sequence
  Synthetic
caaagaugaucacuuuaagg

SEQ ID NO: 806529 - RNA, 20 nt, Artificial Sequence
  Synthetic
ugaaaauucagacuuuaagg

SEQ ID NO: 806530 - RNA, 20 nt, Artificial Sequence
  Synthetic
aguugcacaguauuuuaagg

SEQ ID NO: 806531 - RNA, 20 nt, Artificial Sequence
  Synthetic
uauucagcauacuuuuaagg

SEQ ID NO: 806532 - RNA, 20 nt, Artificial Sequence
  Synthetic
accuccuuagauuuuuaagg

SEQ ID NO: 806533 - RNA, 20 nt, Artificial Sequence
  Synthetic
acuuuauuuacaaaaacagg

SEQ ID NO: 806534 - RNA, 20 nt, Artificial Sequence
  Synthetic
acugcaccuuucaaaacagg

SEQ ID NO: 806535 - RNA, 20 nt, Artificial Sequence
  Synthetic
ucggguucucagaaaacagg

SEQ ID NO: 806536 - RNA, 20 nt, Artificial Sequence
  Synthetic
ugcccuucuuuccaaacagg

SEQ ID NO: 806537 - RNA, 20 nt, Artificial Sequence
  Synthetic
aggggagagcaggaaacagg

SEQ ID NO: 806538 - RNA, 20 nt, Artificial Sequence
  Synthetic
aguuauuggccuuaaacagg

SEQ ID NO: 806539 - RNA, 20 nt, Artificial Sequence
  Synthetic
cuauuugauagcacaacagg

SEQ ID NO: 806540 - RNA, 20 nt, Artificial Sequence
  Synthetic
agagucagaagacgaacagg

SEQ ID NO: 806541 - RNA, 20 nt, Artificial Sequence
  Synthetic
cuggggcucgugggaacagg

SEQ ID NO: 806542 - RNA, 20 nt, Artificial Sequence
  Synthetic
cuuccggguagcugaacagg

SEQ ID NO: 806543 - RNA, 20 nt, Artificial Sequence
  Synthetic
aaguguaaauucauaacagg

SEQ ID NO: 806544 - RNA, 20 nt, Artificial Sequence
  Synthetic
ugugggcugaggauaacagg

SEQ ID NO: 806545 - RNA, 20 nt, Artificial Sequence
  Synthetic
uggugggacccucuaacagg

SEQ ID NO: 806546 - RNA, 20 nt, Artificial Sequence
  Synthetic
ccaaagguaauaaacacagg

SEQ ID NO: 806547 - RNA, 20 nt, Artificial Sequence
  Synthetic
cuccaaaagggcaacacagg

SEQ ID NO: 806548 - RNA, 20 nt, Artificial Sequence
  Synthetic
aaaaagugcaagaacacagg

SEQ ID NO: 806549 - RNA, 20 nt, Artificial Sequence
  Synthetic
ccuagaaucuaacacacagg

SEQ ID NO: 806550 - RNA, 20 nt, Artificial Sequence
  Synthetic
ugaaaacacagggacacagg

SEQ ID NO: 806551 - RNA, 20 nt, Artificial Sequence
  Synthetic
aguuggggaaccuacacagg

SEQ ID NO: 806552 - RNA, 20 nt, Artificial Sequence
  Synthetic
aaacauuaugaguacacagg

SEQ ID NO: 806553 - RNA, 20 nt, Artificial Sequence
  Synthetic
augauucugccuaccacagg

SEQ ID NO: 806554 - RNA, 20 nt, Artificial Sequence
  Synthetic
aauuguucaauagccacagg

SEQ ID NO: 806555 - RNA, 20 nt, Artificial Sequence
  Synthetic
uaaaagaauauagccacagg

SEQ ID NO: 806556 - RNA, 20 nt, Artificial Sequence
  Synthetic
ccuaccuacaauuccacagg

SEQ ID NO: 806557 - RNA, 20 nt, Artificial Sequence
  Synthetic
cacaaucuagaaagcacagg

SEQ ID NO: 806558 - RNA, 20 nt, Artificial Sequence
  Synthetic
cuuauugcggaaggcacagg

SEQ ID NO: 806559 - RNA, 20 nt, Artificial Sequence
  Synthetic
ugcauacucucacucacagg

SEQ ID NO: 806560 - RNA, 20 nt, Artificial Sequence
  Synthetic
cgcauauucucacucacagg

SEQ ID NO: 806561 - RNA, 20 nt, Artificial Sequence
  Synthetic
cacauguucucacucacagg

SEQ ID NO: 806562 - RNA, 20 nt, Artificial Sequence
  Synthetic
cacauguucuuacucacagg

SEQ ID NO: 806563 - RNA, 20 nt, Artificial Sequence
  Synthetic
caagccaccuucuucacagg

SEQ ID NO: 806564 - RNA, 20 nt, Artificial Sequence
  Synthetic
uaccuaaaagaaaagacagg

SEQ ID NO: 806565 - RNA, 20 nt, Artificial Sequence
  Synthetic
uacaacagaauaaagacagg

SEQ ID NO: 806566 - RNA, 20 nt, Artificial Sequence
  Synthetic
ucaugauaaaacaagacagg

SEQ ID NO: 806567 - RNA, 20 nt, Artificial Sequence
  Synthetic
agaaggaaauugaagacagg

SEQ ID NO: 806568 - RNA, 20 nt, Artificial Sequence
  Synthetic
auagccuuggcccagacagg

SEQ ID NO: 806569 - RNA, 20 nt, Artificial Sequence
  Synthetic
uaggaaauaagagagacagg

SEQ ID NO: 806570 - RNA, 20 nt, Artificial Sequence
  Synthetic
agaaagaauggagagacagg

SEQ ID NO: 806571 - RNA, 20 nt, Artificial Sequence
  Synthetic
agcuaacugcuggagacagg

SEQ ID NO: 806572 - RNA, 20 nt, Artificial Sequence
  Synthetic
uauuuugacuaugagacagg

SEQ ID NO: 806573 - RNA, 20 nt, Artificial Sequence
  Synthetic
acucgggaggcugagacagg

SEQ ID NO: 806574 - RNA, 20 nt, Artificial Sequence
  Synthetic
aaagugugaaaauagacagg

SEQ ID NO: 806575 - RNA, 20 nt, Artificial Sequence
  Synthetic
uagguagauagauagacagg

SEQ ID NO: 806576 - RNA, 20 nt, Artificial Sequence
  Synthetic
cacaauuucaauuagacagg

SEQ ID NO: 806577 - RNA, 20 nt, Artificial Sequence
  Synthetic
caaaguuccaguuagacagg

SEQ ID NO: 806578 - RNA, 20 nt, Artificial Sequence
  Synthetic
aaagaggaagacacgacagg

SEQ ID NO: 806579 - RNA, 20 nt, Artificial Sequence
  Synthetic
uuuuuaaaguuugggacagg

SEQ ID NO: 806580 - RNA, 20 nt, Artificial Sequence
  Synthetic
ucuccauuacaauggacagg

SEQ ID NO: 806581 - RNA, 20 nt, Artificial Sequence
  Synthetic
uggagauaaagcaugacagg

SEQ ID NO: 806582 - RNA, 20 nt, Artificial Sequence
  Synthetic
acauuuuuaggcuugacagg

SEQ ID NO: 806583 - RNA, 20 nt, Artificial Sequence
  Synthetic
cacaauuucaguuugacagg

SEQ ID NO: 806584 - RNA, 20 nt, Artificial Sequence
  Synthetic
agacugaugggaaauacagg

SEQ ID NO: 806585 - RNA, 20 nt, Artificial Sequence
  Synthetic
uaucagguaugaaauacagg

SEQ ID NO: 806586 - RNA, 20 nt, Artificial Sequence
  Synthetic
caaguagcugggacuacagg

SEQ ID NO: 806587 - RNA, 20 nt, Artificial Sequence
  Synthetic
agccaaucuaugacuacagg

SEQ ID NO: 806588 - RNA, 20 nt, Artificial Sequence
  Synthetic
auauguacuuuaaguacagg

SEQ ID NO: 806589 - RNA, 20 nt, Artificial Sequence
  Synthetic
cugcaauggaguauuacagg

SEQ ID NO: 806590 - RNA, 20 nt, Artificial Sequence
  Synthetic
aagcucuuacuuauuacagg

SEQ ID NO: 806591 - RNA, 20 nt, Artificial Sequence
  Synthetic
agcuuccuaauguuuacagg

SEQ ID NO: 806592 - RNA, 20 nt, Artificial Sequence
  Synthetic
augucaaguaauuuuacagg

SEQ ID NO: 806593 - RNA, 20 nt, Artificial Sequence
  Synthetic
ucuccuuuuaauuuuacagg

SEQ ID NO: 806594 - RNA, 20 nt, Artificial Sequence
  Synthetic
aaagauuaauaaaaaccagg

SEQ ID NO: 806595 - RNA, 20 nt, Artificial Sequence
  Synthetic
auuauaguuaguaaaccagg

SEQ ID NO: 806596 - RNA, 20 nt, Artificial Sequence
  Synthetic
uguaaagcaaagcaaccagg

SEQ ID NO: 806597 - RNA, 20 nt, Artificial Sequence
  Synthetic
aauaggaacuaggaaccagg

SEQ ID NO: 806598 - RNA, 20 nt, Artificial Sequence
  Synthetic
ugucccaaaaacagaccagg

SEQ ID NO: 806599 - RNA, 20 nt, Artificial Sequence
  Synthetic
agaaaacaacccagaccagg

SEQ ID NO: 806600 - RNA, 20 nt, Artificial Sequence
  Synthetic
cucaggaguuugagaccagg

SEQ ID NO: 806601 - RNA, 20 nt, Artificial Sequence
  Synthetic
cagaugcagccaggaccagg

SEQ ID NO: 806602 - RNA, 20 nt, Artificial Sequence
  Synthetic
aagaaucucuugaacccagg

SEQ ID NO: 806603 - RNA, 20 nt, Artificial Sequence
  Synthetic
uguugugggagggacccagg

SEQ ID NO: 806604 - RNA, 20 nt, Artificial Sequence
  Synthetic
uguagucccagcuacccagg

SEQ ID NO: 806605 - RNA, 20 nt, Artificial Sequence
  Synthetic
ccuuccuagccuuccccagg

SEQ ID NO: 806606 - RNA, 20 nt, Artificial Sequence
  Synthetic
agcacuuugggaggcccagg

SEQ ID NO: 806607 - RNA, 20 nt, Artificial Sequence
  Synthetic
aaaugcuagaucugcccagg

SEQ ID NO: 806608 - RNA, 20 nt, Artificial Sequence
  Synthetic
ucaguuuuucuuugcccagg

SEQ ID NO: 806609 - RNA, 20 nt, Artificial Sequence
  Synthetic
cuguccuugauugucccagg

SEQ ID NO: 806610 - RNA, 20 nt, Artificial Sequence
  Synthetic
uacugggcugcauucccagg

SEQ ID NO: 806611 - RNA, 20 nt, Artificial Sequence
  Synthetic
ugggaaauguaguucccagg

SEQ ID NO: 806612 - RNA, 20 nt, Artificial Sequence
  Synthetic
uggccagagcagaagccagg

SEQ ID NO: 806613 - RNA, 20 nt, Artificial Sequence
  Synthetic
auguacuucacagagccagg

SEQ ID NO: 806614 - RNA, 20 nt, Artificial Sequence
  Synthetic
ccugcccacuuacugccagg

SEQ ID NO: 806615 - RNA, 20 nt, Artificial Sequence
  Synthetic
cacauugccacagauccagg

SEQ ID NO: 806616 - RNA, 20 nt, Artificial Sequence
  Synthetic
cagccuguagcauauccagg

SEQ ID NO: 806617 - RNA, 20 nt, Artificial Sequence
  Synthetic
aucagauaaaaaucuccagg

SEQ ID NO: 806618 - RNA, 20 nt, Artificial Sequence
  Synthetic
aggcugaaaaauauuccagg

SEQ ID NO: 806619 - RNA, 20 nt, Artificial Sequence
  Synthetic
uucuuuuuccaccuuccagg

SEQ ID NO: 806620 - RNA, 20 nt, Artificial Sequence
  Synthetic
cuuaguggaaugcuuccagg

SEQ ID NO: 806621 - RNA, 20 nt, Artificial Sequence
  Synthetic
uugaguggcacuguuccagg

SEQ ID NO: 806622 - RNA, 20 nt, Artificial Sequence
  Synthetic
auuuuuaacaauuuuccagg

SEQ ID NO: 806623 - RNA, 20 nt, Artificial Sequence
  Synthetic
uauaguuaugauuuuccagg

SEQ ID NO: 806624 - RNA, 20 nt, Artificial Sequence
  Synthetic
cuuugggaggccaaagcagg

SEQ ID NO: 806625 - RNA, 20 nt, Artificial Sequence
  Synthetic
cugugggaggcuaaagcagg

SEQ ID NO: 806626 - RNA, 20 nt, Artificial Sequence
  Synthetic
aaugaaaguuugcaagcagg

SEQ ID NO: 806627 - RNA, 20 nt, Artificial Sequence
  Synthetic
uaugccagagaucaagcagg

SEQ ID NO: 806628 - RNA, 20 nt, Artificial Sequence
  Synthetic
uccuaguaaacagaagcagg

SEQ ID NO: 806629 - RNA, 20 nt, Artificial Sequence
  Synthetic
aagggugacccggaagcagg

SEQ ID NO: 806630 - RNA, 20 nt, Artificial Sequence
  Synthetic
acuugggaggcugaagcagg

SEQ ID NO: 806631 - RNA, 20 nt, Artificial Sequence
  Synthetic
cuuugggaggcugaagcagg

SEQ ID NO: 806632 - RNA, 20 nt, Artificial Sequence
  Synthetic
uuauuguguuuauaagcagg

SEQ ID NO: 806633 - RNA, 20 nt, Artificial Sequence
  Synthetic
uccuguaggagcuaagcagg

SEQ ID NO: 806634 - RNA, 20 nt, Artificial Sequence
  Synthetic
aaucuccugaacccagcagg

SEQ ID NO: 806635 - RNA, 20 nt, Artificial Sequence
  Synthetic
cagagaaggcacccagcagg

SEQ ID NO: 806636 - RNA, 20 nt, Artificial Sequence
  Synthetic
aaagaacuugucccagcagg

SEQ ID NO: 806637 - RNA, 20 nt, Artificial Sequence
  Synthetic
augauggacugaagagcagg

SEQ ID NO: 806638 - RNA, 20 nt, Artificial Sequence
  Synthetic
ucuuaguuguuaagagcagg

SEQ ID NO: 806639 - RNA, 20 nt, Artificial Sequence
  Synthetic
ccauuuuggagaggagcagg

SEQ ID NO: 806640 - RNA, 20 nt, Artificial Sequence
  Synthetic
ugguccucaacuggagcagg

SEQ ID NO: 806641 - RNA, 20 nt, Artificial Sequence
  Synthetic
ccuaggcugcacauagcagg

SEQ ID NO: 806642 - RNA, 20 nt, Artificial Sequence
  Synthetic
uagaaggagaugauagcagg

SEQ ID NO: 806643 - RNA, 20 nt, Artificial Sequence
  Synthetic
uuugccaaaugaguagcagg

SEQ ID NO: 806644 - RNA, 20 nt, Artificial Sequence
  Synthetic
acggguagagagguagcagg

SEQ ID NO: 806645 - RNA, 20 nt, Artificial Sequence
  Synthetic
ucucagacugugguagcagg

SEQ ID NO: 806646 - RNA, 20 nt, Artificial Sequence
  Synthetic
uuuccaucaggggacgcagg

SEQ ID NO: 806647 - RNA, 20 nt, Artificial Sequence
  Synthetic
cuuugggaggccaaggcagg

SEQ ID NO: 806648 - RNA, 20 nt, Artificial Sequence
  Synthetic
ugaccucaucaacaggcagg

SEQ ID NO: 806649 - RNA, 20 nt, Artificial Sequence
  Synthetic
cuuugcgaggccgaggcagg

SEQ ID NO: 806650 - RNA, 20 nt, Artificial Sequence
  Synthetic
cuuugggaggccgaggcagg

SEQ ID NO: 806651 - RNA, 20 nt, Artificial Sequence
  Synthetic
cuuugggaagcugaggcagg

SEQ ID NO: 806652 - RNA, 20 nt, Artificial Sequence
  Synthetic
acucaggacgcugaggcagg

SEQ ID NO: 806653 - RNA, 20 nt, Artificial Sequence
  Synthetic
cuuugagaggcugaggcagg

SEQ ID NO: 806654 - RNA, 20 nt, Artificial Sequence
  Synthetic
acucaggaggcugaggcagg

SEQ ID NO: 806655 - RNA, 20 nt, Artificial Sequence
  Synthetic
acuagggaggcugaggcagg

SEQ ID NO: 806656 - RNA, 20 nt, Artificial Sequence
  Synthetic
cuaugggaggcugaggcagg

SEQ ID NO: 806657 - RNA, 20 nt, Artificial Sequence
  Synthetic
cuuugggaggcugaggcagg

SEQ ID NO: 806658 - RNA, 20 nt, Artificial Sequence
  Synthetic
acacuggaggcugaggcagg

SEQ ID NO: 806659 - RNA, 20 nt, Artificial Sequence
  Synthetic
cuuugggaugcugaggcagg

SEQ ID NO: 806660 - RNA, 20 nt, Artificial Sequence
  Synthetic
acugaccugugugaggcagg

SEQ ID NO: 806661 - RNA, 20 nt, Artificial Sequence
  Synthetic
cucguacugauagcggcagg

SEQ ID NO: 806662 - RNA, 20 nt, Artificial Sequence
  Synthetic
acccgaaaggcuggggcagg

SEQ ID NO: 806663 - RNA, 20 nt, Artificial Sequence
  Synthetic
uuuaaagaguaaugggcagg

SEQ ID NO: 806664 - RNA, 20 nt, Artificial Sequence
  Synthetic
ucacagauggggugggcagg

SEQ ID NO: 806665 - RNA, 20 nt, Artificial Sequence
  Synthetic
ccucuucacaggguggcagg

SEQ ID NO: 806666 - RNA, 20 nt, Artificial Sequence
  Synthetic
aauaagcuguugguggcagg

SEQ ID NO: 806667 - RNA, 20 nt, Artificial Sequence
  Synthetic
uuucagcagcauguggcagg

SEQ ID NO: 806668 - RNA, 20 nt, Artificial Sequence
  Synthetic
cuguuauaagccuuggcagg

SEQ ID NO: 806669 - RNA, 20 nt, Artificial Sequence
  Synthetic
aucaaguuaagcaaugcagg

SEQ ID NO: 806670 - RNA, 20 nt, Artificial Sequence
  Synthetic
auaguguagaaaacugcagg

SEQ ID NO: 806671 - RNA, 20 nt, Artificial Sequence
  Synthetic
auucugcuagauacugcagg

SEQ ID NO: 806672 - RNA, 20 nt, Artificial Sequence
  Synthetic
ccagugccaccaccugcagg

SEQ ID NO: 806673 - RNA, 20 nt, Artificial Sequence
  Synthetic
cugaugucuccaccugcagg

SEQ ID NO: 806674 - RNA, 20 nt, Artificial Sequence
  Synthetic
caaaucagaauuucugcagg

SEQ ID NO: 806675 - RNA, 20 nt, Artificial Sequence
  Synthetic
uuccuugcccaccuugcagg

SEQ ID NO: 806676 - RNA, 20 nt, Artificial Sequence
  Synthetic
uucuuguggcucuuugcagg

SEQ ID NO: 806677 - RNA, 20 nt, Artificial Sequence
  Synthetic
agguaagucugaacaucagg

SEQ ID NO: 806678 - RNA, 20 nt, Artificial Sequence
  Synthetic
acauugagaaccacaucagg

SEQ ID NO: 806679 - RNA, 20 nt, Artificial Sequence
  Synthetic
aaccggggccccacaucagg

SEQ ID NO: 806680 - RNA, 20 nt, Artificial Sequence
  Synthetic
uuguauuacgucacaucagg

SEQ ID NO: 806681 - RNA, 20 nt, Artificial Sequence
  Synthetic
caggagaugucaccaucagg

SEQ ID NO: 806682 - RNA, 20 nt, Artificial Sequence
  Synthetic
uguauucuuccaucaucagg

SEQ ID NO: 806683 - RNA, 20 nt, Artificial Sequence
  Synthetic
uaacucauucaaagaucagg

SEQ ID NO: 806684 - RNA, 20 nt, Artificial Sequence
  Synthetic
uggaggcagcuaggaucagg

SEQ ID NO: 806685 - RNA, 20 nt, Artificial Sequence
  Synthetic
acguccugggagggaucagg

SEQ ID NO: 806686 - RNA, 20 nt, Artificial Sequence
  Synthetic
ccuccaaaugguggaucagg

SEQ ID NO: 806687 - RNA, 20 nt, Artificial Sequence
  Synthetic
agaaaguacuagauaucagg

SEQ ID NO: 806688 - RNA, 20 nt, Artificial Sequence
  Synthetic
uguagucccagauacucagg

SEQ ID NO: 806689 - RNA, 20 nt, Artificial Sequence
  Synthetic
uauaaucccaacuacucagg

SEQ ID NO: 806690 - RNA, 20 nt, Artificial Sequence
  Synthetic
cuguagucccacuacucagg

SEQ ID NO: 806691 - RNA, 20 nt, Artificial Sequence
  Synthetic
uguaguaccagcuacucagg

SEQ ID NO: 806692 - RNA, 20 nt, Artificial Sequence
  Synthetic
uguaaccccagcuacucagg

SEQ ID NO: 806693 - RNA, 20 nt, Artificial Sequence
  Synthetic
uguagccccagcuacucagg

SEQ ID NO: 806694 - RNA, 20 nt, Artificial Sequence
  Synthetic
cguaaucccagcuacucagg

SEQ ID NO: 806695 - RNA, 20 nt, Artificial Sequence
  Synthetic
uguaaucccagcuacucagg

SEQ ID NO: 806696 - RNA, 20 nt, Artificial Sequence
  Synthetic
uguagucccagcuacucagg

SEQ ID NO: 806697 - RNA, 20 nt, Artificial Sequence
  Synthetic
uguggucccagcuacucagg

SEQ ID NO: 806698 - RNA, 20 nt, Artificial Sequence
  Synthetic
uguagucucagcuacucagg

SEQ ID NO: 806699 - RNA, 20 nt, Artificial Sequence
  Synthetic
uauaauccuagcuacucagg

SEQ ID NO: 806700 - RNA, 20 nt, Artificial Sequence
  Synthetic
uguagccuuagcuacucagg

SEQ ID NO: 806701 - RNA, 20 nt, Artificial Sequence
  Synthetic
uguagucccaucuacucagg

SEQ ID NO: 806702 - RNA, 20 nt, Artificial Sequence
  Synthetic
agucaccuuaucuacucagg

SEQ ID NO: 806703 - RNA, 20 nt, Artificial Sequence
  Synthetic
uuagcuuuuucaaccucagg

SEQ ID NO: 806704 - RNA, 20 nt, Artificial Sequence
  Synthetic
uucugggcucucuccucagg

SEQ ID NO: 806705 - RNA, 20 nt, Artificial Sequence
  Synthetic
acuagccuacucaucucagg

SEQ ID NO: 806706 - RNA, 20 nt, Artificial Sequence
  Synthetic
ucaagugauggucagucagg

SEQ ID NO: 806707 - RNA, 20 nt, Artificial Sequence
  Synthetic
aaacuaacauuuuagucagg

SEQ ID NO: 806708 - RNA, 20 nt, Artificial Sequence
  Synthetic
acacacuggggccugucagg

SEQ ID NO: 806709 - RNA, 20 nt, Artificial Sequence
  Synthetic
auuaauagaccagugucagg

SEQ ID NO: 806710 - RNA, 20 nt, Artificial Sequence
  Synthetic
ucugagaucaaggugucagg

SEQ ID NO: 806711 - RNA, 20 nt, Artificial Sequence
  Synthetic
auauacaagcaaaauucagg

SEQ ID NO: 806712 - RNA, 20 nt, Artificial Sequence
  Synthetic
ccuuuugauggacauucagg

SEQ ID NO: 806713 - RNA, 20 nt, Artificial Sequence
  Synthetic
cuucaaagcauucauucagg

SEQ ID NO: 806714 - RNA, 20 nt, Artificial Sequence
  Synthetic
agcuacaagucauauucagg

SEQ ID NO: 806715 - RNA, 20 nt, Artificial Sequence
  Synthetic
uguaaucccagcuauucagg

SEQ ID NO: 806716 - RNA, 20 nt, Artificial Sequence
  Synthetic
aucaccuugcucuauucagg

SEQ ID NO: 806717 - RNA, 20 nt, Artificial Sequence
  Synthetic
aaaaagauuuuuuauucagg

SEQ ID NO: 806718 - RNA, 20 nt, Artificial Sequence
  Synthetic
accccaugaauuacuucagg

SEQ ID NO: 806719 - RNA, 20 nt, Artificial Sequence
  Synthetic
uguaaucucagcgcuucagg

SEQ ID NO: 806720 - RNA, 20 nt, Artificial Sequence
  Synthetic
acagauagauguucuucagg

SEQ ID NO: 806721 - RNA, 20 nt, Artificial Sequence
  Synthetic
cuugaggcucuguguucagg

SEQ ID NO: 806722 - RNA, 20 nt, Artificial Sequence
  Synthetic
uguugucuauuuuguucagg

SEQ ID NO: 806723 - RNA, 20 nt, Artificial Sequence
  Synthetic
uucagaauauggauuucagg

SEQ ID NO: 806724 - RNA, 20 nt, Artificial Sequence
  Synthetic
aagcuucucuauauuucagg

SEQ ID NO: 806725 - RNA, 20 nt, Artificial Sequence
  Synthetic
aucaacaggcuuauuucagg

SEQ ID NO: 806726 - RNA, 20 nt, Artificial Sequence
  Synthetic
uacaaagaaacauuuucagg

SEQ ID NO: 806727 - RNA, 20 nt, Artificial Sequence
  Synthetic
ccucauucagcuuuuucagg

SEQ ID NO: 806728 - RNA, 20 nt, Artificial Sequence
  Synthetic
aaaagaagggcaaaaagagg

SEQ ID NO: 806729 - RNA, 20 nt, Artificial Sequence
  Synthetic
acucuuuccaucaaaagagg

SEQ ID NO: 806730 - RNA, 20 nt, Artificial Sequence
  Synthetic
acuuguggcaagaaaagagg

SEQ ID NO: 806731 - RNA, 20 nt, Artificial Sequence
  Synthetic
ucaacggaaaauaaaagagg

SEQ ID NO: 806732 - RNA, 20 nt, Artificial Sequence
  Synthetic
accaggcauuguaaaagagg

SEQ ID NO: 806733 - RNA, 20 nt, Artificial Sequence
  Synthetic
aacuuuagucaggaaagagg

SEQ ID NO: 806734 - RNA, 20 nt, Artificial Sequence
  Synthetic
aagagcaucuaggaaagagg

SEQ ID NO: 806735 - RNA, 20 nt, Artificial Sequence
  Synthetic
ugaauaaagagggaaagagg

SEQ ID NO: 806736 - RNA, 20 nt, Artificial Sequence
  Synthetic
cagagaaggauuccaagagg

SEQ ID NO: 806737 - RNA, 20 nt, Artificial Sequence
  Synthetic
uugccuuagaggucaagagg

SEQ ID NO: 806738 - RNA, 20 nt, Artificial Sequence
  Synthetic
uggcaaguuuaaagaagagg

SEQ ID NO: 806739 - RNA, 20 nt, Artificial Sequence
  Synthetic
acauagaguagaagaagagg

SEQ ID NO: 806740 - RNA, 20 nt, Artificial Sequence
  Synthetic
aaggcaguggggagaagagg

SEQ ID NO: 806741 - RNA, 20 nt, Artificial Sequence
  Synthetic
aaucacuugaaacuaagagg

SEQ ID NO: 806742 - RNA, 20 nt, Artificial Sequence
  Synthetic
aggcuuguccuucuaagagg

SEQ ID NO: 806743 - RNA, 20 nt, Artificial Sequence
  Synthetic
aggacucuaacauuaagagg

SEQ ID NO: 806744 - RNA, 20 nt, Artificial Sequence
  Synthetic
uggguauuuccauuaagagg

SEQ ID NO: 806745 - RNA, 20 nt, Artificial Sequence
  Synthetic
uuauagguauaguuaagagg

SEQ ID NO: 806746 - RNA, 20 nt, Artificial Sequence
  Synthetic
uaaaccccucuccacagagg

SEQ ID NO: 806747 - RNA, 20 nt, Artificial Sequence
  Synthetic
ccaaaagagugagacagagg

SEQ ID NO: 806748 - RNA, 20 nt, Artificial Sequence
  Synthetic
acaagcacauaggacagagg

SEQ ID NO: 806749 - RNA, 20 nt, Artificial Sequence
  Synthetic
cuucccuaaagauacagagg

SEQ ID NO: 806750 - RNA, 20 nt, Artificial Sequence
  Synthetic
uuguccccaaucuacagagg

SEQ ID NO: 806751 - RNA, 20 nt, Artificial Sequence
  Synthetic
auaagaagacaaaccagagg

SEQ ID NO: 806752 - RNA, 20 nt, Artificial Sequence
  Synthetic
uacagggaaaaggccagagg

SEQ ID NO: 806753 - RNA, 20 nt, Artificial Sequence
  Synthetic
uugucuagauguagcagagg

SEQ ID NO: 806754 - RNA, 20 nt, Artificial Sequence
  Synthetic
cacugaaguccaggcagagg

SEQ ID NO: 806755 - RNA, 20 nt, Artificial Sequence
  Synthetic
uugaacccaagaggcagagg

SEQ ID NO: 806756 - RNA, 20 nt, Artificial Sequence
  Synthetic
agcacuuugggaggcagagg

SEQ ID NO: 806757 - RNA, 20 nt, Artificial Sequence
  Synthetic
agaagacacgauugcagagg

SEQ ID NO: 806758 - RNA, 20 nt, Artificial Sequence
  Synthetic
uuacuaguccacaucagagg

SEQ ID NO: 806759 - RNA, 20 nt, Artificial Sequence
  Synthetic
ucagcaguagucuucagagg

SEQ ID NO: 806760 - RNA, 20 nt, Artificial Sequence
  Synthetic
uacaugguagaaaagagagg

SEQ ID NO: 806761 - RNA, 20 nt, Artificial Sequence
  Synthetic
acaauggucucuaagagagg

SEQ ID NO: 806762 - RNA, 20 nt, Artificial Sequence
  Synthetic
aguaacaaauaacagagagg

SEQ ID NO: 806763 - RNA, 20 nt, Artificial Sequence
  Synthetic
ugaguagaacuacagagagg

SEQ ID NO: 806764 - RNA, 20 nt, Artificial Sequence
  Synthetic
uuucugcaagugcagagagg

SEQ ID NO: 806765 - RNA, 20 nt, Artificial Sequence
  Synthetic
uugauuuuucaagagagagg

SEQ ID NO: 806766 - RNA, 20 nt, Artificial Sequence
  Synthetic
uucccauuuacagagagagg

SEQ ID NO: 806767 - RNA, 20 nt, Artificial Sequence
  Synthetic
cauuaugggagggagagagg

SEQ ID NO: 806768 - RNA, 20 nt, Artificial Sequence
  Synthetic
ucguauguuggggagagagg

SEQ ID NO: 806769 - RNA, 20 nt, Artificial Sequence
  Synthetic
uaucgcuugaacccgagagg

SEQ ID NO: 806770 - RNA, 20 nt, Artificial Sequence
  Synthetic
aguugggugauuaggagagg

SEQ ID NO: 806771 - RNA, 20 nt, Artificial Sequence
  Synthetic
ugaggagguggagggagagg

SEQ ID NO: 806772 - RNA, 20 nt, Artificial Sequence
  Synthetic
acagacuuauuugggagagg

SEQ ID NO: 806773 - RNA, 20 nt, Artificial Sequence
  Synthetic
ucauggcagaaagugagagg

SEQ ID NO: 806774 - RNA, 20 nt, Artificial Sequence
  Synthetic
aaagaauucagggugagagg

SEQ ID NO: 806775 - RNA, 20 nt, Artificial Sequence
  Synthetic
aagaugagcugggugagagg

SEQ ID NO: 806776 - RNA, 20 nt, Artificial Sequence
  Synthetic
uauucgaauguauugagagg

SEQ ID NO: 806777 - RNA, 20 nt, Artificial Sequence
  Synthetic
cuaagcagcuauuugagagg

SEQ ID NO: 806778 - RNA, 20 nt, Artificial Sequence
  Synthetic
auaaaaaacaagaauagagg

SEQ ID NO: 806779 - RNA, 20 nt, Artificial Sequence
  Synthetic
agaaguaaaccugauagagg

SEQ ID NO: 806780 - RNA, 20 nt, Artificial Sequence
  Synthetic
uaggaggaauuuuauagagg

SEQ ID NO: 806781 - RNA, 20 nt, Artificial Sequence
  Synthetic
uguugagagaaaacuagagg

SEQ ID NO: 806782 - RNA, 20 nt, Artificial Sequence
  Synthetic
uuuuguauuuguaguagagg

SEQ ID NO: 806783 - RNA, 20 nt, Artificial Sequence
  Synthetic
uuguguauuuuuaguagagg

SEQ ID NO: 806784 - RNA, 20 nt, Artificial Sequence
  Synthetic
uauaaucucuaauguagagg

SEQ ID NO: 806785 - RNA, 20 nt, Artificial Sequence
  Synthetic
ucugaaagaguauguagagg

SEQ ID NO: 806786 - RNA, 20 nt, Artificial Sequence
  Synthetic
agcauuuugccaauuagagg

SEQ ID NO: 806787 - RNA, 20 nt, Artificial Sequence
  Synthetic
acaauaaagucaauuagagg

SEQ ID NO: 806788 - RNA, 20 nt, Artificial Sequence
  Synthetic
uaagguacugagauuagagg

SEQ ID NO: 806789 - RNA, 20 nt, Artificial Sequence
  Synthetic
aacccuagucauuuuagagg

SEQ ID NO: 806790 - RNA, 20 nt, Artificial Sequence
  Synthetic
uacuauuauuauuuuagagg

SEQ ID NO: 806791 - RNA, 20 nt, Artificial Sequence
  Synthetic
caggcaaggcuuuuuagagg

SEQ ID NO: 806792 - RNA, 20 nt, Artificial Sequence
  Synthetic
agagacauauuccaacgagg

SEQ ID NO: 806793 - RNA, 20 nt, Artificial Sequence
  Synthetic
aaucgcuugaacccacgagg

SEQ ID NO: 806794 - RNA, 20 nt, Artificial Sequence
  Synthetic
agcacuuuggaaggccgagg

SEQ ID NO: 806795 - RNA, 20 nt, Artificial Sequence
  Synthetic
agcaauuugagaggccgagg

SEQ ID NO: 806796 - RNA, 20 nt, Artificial Sequence
  Synthetic
agcgcuucaggaggccgagg

SEQ ID NO: 806797 - RNA, 20 nt, Artificial Sequence
  Synthetic
agcacuuggggaggccgagg

SEQ ID NO: 806798 - RNA, 20 nt, Artificial Sequence
  Synthetic
agcacucugggaggccgagg

SEQ ID NO: 806799 - RNA, 20 nt, Artificial Sequence
  Synthetic
agcaauuugggaggccgagg

SEQ ID NO: 806800 - RNA, 20 nt, Artificial Sequence
  Synthetic
agcacuuugggaggccgagg

SEQ ID NO: 806801 - RNA, 20 nt, Artificial Sequence
  Synthetic
aguacuuugggaggccgagg

SEQ ID NO: 806802 - RNA, 20 nt, Artificial Sequence
  Synthetic
agcucuuugugaggccgagg

SEQ ID NO: 806803 - RNA, 20 nt, Artificial Sequence
  Synthetic
aacacuuuggggggccgagg

SEQ ID NO: 806804 - RNA, 20 nt, Artificial Sequence
  Synthetic
uuuuuuuuuuuuuuccgagg

SEQ ID NO: 806805 - RNA, 20 nt, Artificial Sequence
  Synthetic
caccgaggccugucgcgagg

SEQ ID NO: 806806 - RNA, 20 nt, Artificial Sequence
  Synthetic
uuaggcacuccgaaaggagg

SEQ ID NO: 806807 - RNA, 20 nt, Artificial Sequence
  Synthetic
uucaaaucacugaaaggagg

SEQ ID NO: 806808 - RNA, 20 nt, Artificial Sequence
  Synthetic
uucucaacaaguaaaggagg

SEQ ID NO: 806809 - RNA, 20 nt, Artificial Sequence
  Synthetic
uuuuccccaggucaaggagg

SEQ ID NO: 806810 - RNA, 20 nt, Artificial Sequence
  Synthetic
auccuaaaaacagaaggagg

SEQ ID NO: 806811 - RNA, 20 nt, Artificial Sequence
  Synthetic
ugaaagacuagagaaggagg

SEQ ID NO: 806812 - RNA, 20 nt, Artificial Sequence
  Synthetic
aagaaagggaaggaaggagg

SEQ ID NO: 806813 - RNA, 20 nt, Artificial Sequence
  Synthetic
ccaguaaagacugaaggagg

SEQ ID NO: 806814 - RNA, 20 nt, Artificial Sequence
  Synthetic
acucaguaggcugaaggagg

SEQ ID NO: 806815 - RNA, 20 nt, Artificial Sequence
  Synthetic
aauaaagcuagguaaggagg

SEQ ID NO: 806816 - RNA, 20 nt, Artificial Sequence
  Synthetic
uuguauaugguguaaggagg

SEQ ID NO: 806817 - RNA, 20 nt, Artificial Sequence
  Synthetic
acucacuugaucacaggagg

SEQ ID NO: 806818 - RNA, 20 nt, Artificial Sequence
  Synthetic
aaucacuggaacccaggagg

SEQ ID NO: 806819 - RNA, 20 nt, Artificial Sequence
  Synthetic
aauggcgugaacccaggagg

SEQ ID NO: 806820 - RNA, 20 nt, Artificial Sequence
  Synthetic
aaucccuugaacccaggagg

SEQ ID NO: 806821 - RNA, 20 nt, Artificial Sequence
  Synthetic
aaucgcuugaacccaggagg

SEQ ID NO: 806822 - RNA, 20 nt, Artificial Sequence
  Synthetic
aauugcuugaacccaggagg

SEQ ID NO: 806823 - RNA, 20 nt, Artificial Sequence
  Synthetic
aaucucuugaacccaggagg

SEQ ID NO: 806824 - RNA, 20 nt, Artificial Sequence
  Synthetic
aaucauuugaacccaggagg

SEQ ID NO: 806825 - RNA, 20 nt, Artificial Sequence
  Synthetic
aaucguuugaacccaggagg

SEQ ID NO: 806826 - RNA, 20 nt, Artificial Sequence
  Synthetic
aacugcuugagcccaggagg

SEQ ID NO: 806827 - RNA, 20 nt, Artificial Sequence
  Synthetic
aguggaaugcuuccaggagg

SEQ ID NO: 806828 - RNA, 20 nt, Artificial Sequence
  Synthetic
agaaggcacccagcaggagg

SEQ ID NO: 806829 - RNA, 20 nt, Artificial Sequence
  Synthetic
cagacugugguagcaggagg

SEQ ID NO: 806830 - RNA, 20 nt, Artificial Sequence
  Synthetic
agagagauguaggcaggagg

SEQ ID NO: 806831 - RNA, 20 nt, Artificial Sequence
  Synthetic
auucuuccaucaucaggagg

SEQ ID NO: 806832 - RNA, 20 nt, Artificial Sequence
  Synthetic
cuucucuauauuucaggagg

SEQ ID NO: 806833 - RNA, 20 nt, Artificial Sequence
  Synthetic
auaaagagggaaagaggagg

SEQ ID NO: 806834 - RNA, 20 nt, Artificial Sequence
  Synthetic
uaugggagggagagaggagg

SEQ ID NO: 806835 - RNA, 20 nt, Artificial Sequence
  Synthetic
aggcuuuuuagaggaggagg

SEQ ID NO: 806836 - RNA, 20 nt, Artificial Sequence
  Synthetic
aguuggggauuuggaggagg

SEQ ID NO: 806837 - RNA, 20 nt, Artificial Sequence
  Synthetic
cguuaaguaggcugaggagg

SEQ ID NO: 806838 - RNA, 20 nt, Artificial Sequence
  Synthetic
agcaaucuucucugaggagg

SEQ ID NO: 806839 - RNA, 20 nt, Artificial Sequence
  Synthetic
ucuuugauuaggugaggagg

SEQ ID NO: 806840 - RNA, 20 nt, Artificial Sequence
  Synthetic
acacuuggaaggguaggagg

SEQ ID NO: 806841 - RNA, 20 nt, Artificial Sequence
  Synthetic
uguuauaaauuauuaggagg

SEQ ID NO: 806842 - RNA, 20 nt, Artificial Sequence
  Synthetic
aauggugugaacuuaggagg

SEQ ID NO: 806843 - RNA, 20 nt, Artificial Sequence
  Synthetic
agauguuugagucacggagg

SEQ ID NO: 806844 - RNA, 20 nt, Artificial Sequence
  Synthetic
uagaggucaagaggcggagg

SEQ ID NO: 806845 - RNA, 20 nt, Artificial Sequence
  Synthetic
agguauggggcaaagggagg

SEQ ID NO: 806846 - RNA, 20 nt, Artificial Sequence
  Synthetic
uuguugaauggaaagggagg

SEQ ID NO: 806847 - RNA, 20 nt, Artificial Sequence
  Synthetic
caagguuagaggaagggagg

SEQ ID NO: 806848 - RNA, 20 nt, Artificial Sequence
  Synthetic
ugcaucaauaauaagggagg

SEQ ID NO: 806849 - RNA, 20 nt, Artificial Sequence
  Synthetic
ucaucuuaaucacagggagg

SEQ ID NO: 806850 - RNA, 20 nt, Artificial Sequence
  Synthetic
aguggagagagagagggagg

SEQ ID NO: 806851 - RNA, 20 nt, Artificial Sequence
  Synthetic
uggggacuacuagagggagg

SEQ ID NO: 806852 - RNA, 20 nt, Artificial Sequence
  Synthetic
ugcugggggugugagggagg

SEQ ID NO: 806853 - RNA, 20 nt, Artificial Sequence
  Synthetic
ugaguugagaaguagggagg

SEQ ID NO: 806854 - RNA, 20 nt, Artificial Sequence
  Synthetic
aguugcucgaacccgggagg

SEQ ID NO: 806855 - RNA, 20 nt, Artificial Sequence
  Synthetic
aauggcgugaacccgggagg

SEQ ID NO: 806856 - RNA, 20 nt, Artificial Sequence
  Synthetic
aauggugugaacccgggagg

SEQ ID NO: 806857 - RNA, 20 nt, Artificial Sequence
  Synthetic
aaucacuugaacccgggagg

SEQ ID NO: 806858 - RNA, 20 nt, Artificial Sequence
  Synthetic
aaucgcuugaacccgggagg

SEQ ID NO: 806859 - RNA, 20 nt, Artificial Sequence
  Synthetic
aauugcuugaacccgggagg

SEQ ID NO: 806860 - RNA, 20 nt, Artificial Sequence
  Synthetic
aaucacuugaagccgggagg

SEQ ID NO: 806861 - RNA, 20 nt, Artificial Sequence
  Synthetic
aaucacuugaacucgggagg

SEQ ID NO: 806862 - RNA, 20 nt, Artificial Sequence
  Synthetic
agucccagcuacucgggagg

SEQ ID NO: 806863 - RNA, 20 nt, Artificial Sequence
  Synthetic
aauucaugauugaggggagg

SEQ ID NO: 806864 - RNA, 20 nt, Artificial Sequence
  Synthetic
uaguggaggagucggggagg

SEQ ID NO: 806865 - RNA, 20 nt, Artificial Sequence
  Synthetic
ugcuucauuggucggggagg

SEQ ID NO: 806866 - RNA, 20 nt, Artificial Sequence
  Synthetic
ugugguggggucgggggagg

SEQ ID NO: 806867 - RNA, 20 nt, Artificial Sequence
  Synthetic
uguuguggggucgggggagg

SEQ ID NO: 806868 - RNA, 20 nt, Artificial Sequence
  Synthetic
uccacagaccuggggggagg

SEQ ID NO: 806869 - RNA, 20 nt, Artificial Sequence
  Synthetic
ugucgugggguggggggagg

SEQ ID NO: 806870 - RNA, 20 nt, Artificial Sequence
  Synthetic
uguggugggguggggggagg

SEQ ID NO: 806871 - RNA, 20 nt, Artificial Sequence
  Synthetic
ugcugugggguggggggagg

SEQ ID NO: 806872 - RNA, 20 nt, Artificial Sequence
  Synthetic
uguugugggguggggggagg

SEQ ID NO: 806873 - RNA, 20 nt, Artificial Sequence
  Synthetic
ugggaagggucguggggagg

SEQ ID NO: 806874 - RNA, 20 nt, Artificial Sequence
  Synthetic
aauaacuuuuagaugggagg

SEQ ID NO: 806875 - RNA, 20 nt, Artificial Sequence
  Synthetic
auaccaaaacuuaugggagg

SEQ ID NO: 806876 - RNA, 20 nt, Artificial Sequence
  Synthetic
aauggcaugaaccugggagg

SEQ ID NO: 806877 - RNA, 20 nt, Artificial Sequence
  Synthetic
aauggcgugaaccugggagg

SEQ ID NO: 806878 - RNA, 20 nt, Artificial Sequence
  Synthetic
aaccacuugaaccugggagg

SEQ ID NO: 806879 - RNA, 20 nt, Artificial Sequence
  Synthetic
aaucacuugaaccugggagg

SEQ ID NO: 806880 - RNA, 20 nt, Artificial Sequence
  Synthetic
aagcgcuugaaccugggagg

SEQ ID NO: 806881 - RNA, 20 nt, Artificial Sequence
  Synthetic
aauugcuugaaccugggagg

SEQ ID NO: 806882 - RNA, 20 nt, Artificial Sequence
  Synthetic
aauuguuugaaccugggagg

SEQ ID NO: 806883 - RNA, 20 nt, Artificial Sequence
  Synthetic
ccaugauagcagcugggagg

SEQ ID NO: 806884 - RNA, 20 nt, Artificial Sequence
  Synthetic
aauagcuugaaucugggagg

SEQ ID NO: 806885 - RNA, 20 nt, Artificial Sequence
  Synthetic
agaagauagugugugggagg

SEQ ID NO: 806886 - RNA, 20 nt, Artificial Sequence
  Synthetic
aaucgcuugaacuugggagg

SEQ ID NO: 806887 - RNA, 20 nt, Artificial Sequence
  Synthetic
agucccaguuauuugggagg

SEQ ID NO: 806888 - RNA, 20 nt, Artificial Sequence
  Synthetic
ucaagaagauuuuugggagg

SEQ ID NO: 806889 - RNA, 20 nt, Artificial Sequence
  Synthetic
acauaagaucagaauggagg

SEQ ID NO: 806890 - RNA, 20 nt, Artificial Sequence
  Synthetic
cuaaauauaaugaauggagg

SEQ ID NO: 806891 - RNA, 20 nt, Artificial Sequence
  Synthetic
cuauauaaacuuaauggagg

SEQ ID NO: 806892 - RNA, 20 nt, Artificial Sequence
  Synthetic
cauagaguuggggauggagg

SEQ ID NO: 806893 - RNA, 20 nt, Artificial Sequence
  Synthetic
aagcgaucugcuccuggagg

SEQ ID NO: 806894 - RNA, 20 nt, Artificial Sequence
  Synthetic
ugguugcuaagggcuggagg

SEQ ID NO: 806895 - RNA, 20 nt, Artificial Sequence
  Synthetic
caaaagauuaaugcuggagg

SEQ ID NO: 806896 - RNA, 20 nt, Artificial Sequence
  Synthetic
uuguuuggcuccucuggagg

SEQ ID NO: 806897 - RNA, 20 nt, Artificial Sequence
  Synthetic
ucagaagacuucucuggagg

SEQ ID NO: 806898 - RNA, 20 nt, Artificial Sequence
  Synthetic
aauuauagaaagucuggagg

SEQ ID NO: 806899 - RNA, 20 nt, Artificial Sequence
  Synthetic
uugcuggggaaaaguggagg

SEQ ID NO: 806900 - RNA, 20 nt, Artificial Sequence
  Synthetic
ugggcaggaaugaguggagg

SEQ ID NO: 806901 - RNA, 20 nt, Artificial Sequence
  Synthetic
aggagggagaaagguggagg

SEQ ID NO: 806902 - RNA, 20 nt, Artificial Sequence
  Synthetic
cccggggguggagguggagg

SEQ ID NO: 806903 - RNA, 20 nt, Artificial Sequence
  Synthetic
agguuuguuguggguggagg

SEQ ID NO: 806904 - RNA, 20 nt, Artificial Sequence
  Synthetic
agagagggaguauguggagg

SEQ ID NO: 806905 - RNA, 20 nt, Artificial Sequence
  Synthetic
cuuaauucaauuuguggagg

SEQ ID NO: 806906 - RNA, 20 nt, Artificial Sequence
  Synthetic
uaauggugcguuuguggagg

SEQ ID NO: 806907 - RNA, 20 nt, Artificial Sequence
  Synthetic
uugauccucaauauuggagg

SEQ ID NO: 806908 - RNA, 20 nt, Artificial Sequence
  Synthetic
agcugguaaagacuuggagg

SEQ ID NO: 806909 - RNA, 20 nt, Artificial Sequence
  Synthetic
uuaaaaaaacuucuuggagg

SEQ ID NO: 806910 - RNA, 20 nt, Artificial Sequence
  Synthetic
aguguggcaauaguuggagg

SEQ ID NO: 806911 - RNA, 20 nt, Artificial Sequence
  Synthetic
auggaucuuacauuuggagg

SEQ ID NO: 806912 - RNA, 20 nt, Artificial Sequence
  Synthetic
agaaggggcagauuuggagg

SEQ ID NO: 806913 - RNA, 20 nt, Artificial Sequence
  Synthetic
ucaaguuggggauuuggagg

SEQ ID NO: 806914 - RNA, 20 nt, Artificial Sequence
  Synthetic
ccccaauggauauuuggagg

SEQ ID NO: 806915 - RNA, 20 nt, Artificial Sequence
  Synthetic
ugcaggccauaguuuggagg

SEQ ID NO: 806916 - RNA, 20 nt, Artificial Sequence
  Synthetic
caggggagaaggcaaugagg

SEQ ID NO: 806917 - RNA, 20 nt, Artificial Sequence
  Synthetic
ucuucuugaugauaaugagg

SEQ ID NO: 806918 - RNA, 20 nt, Artificial Sequence
  Synthetic
accauuuuaagaggaugagg

SEQ ID NO: 806919 - RNA, 20 nt, Artificial Sequence
  Synthetic
agcacuuugggaggaugagg

SEQ ID NO: 806920 - RNA, 20 nt, Artificial Sequence
  Synthetic
ucauucaaagugggaugagg

SEQ ID NO: 806921 - RNA, 20 nt, Artificial Sequence
  Synthetic
aguaaacaggagugaugagg

SEQ ID NO: 806922 - RNA, 20 nt, Artificial Sequence
  Synthetic
auguugguuuuauuaugagg

SEQ ID NO: 806923 - RNA, 20 nt, Artificial Sequence
  Synthetic
uaaucaaaucaucacugagg

SEQ ID NO: 806924 - RNA, 20 nt, Artificial Sequence
  Synthetic
caauaaaguccagacugagg

SEQ ID NO: 806925 - RNA, 20 nt, Artificial Sequence
  Synthetic
cagagauuuaucuacugagg

SEQ ID NO: 806926 - RNA, 20 nt, Artificial Sequence
  Synthetic
caagguaugcuccccugagg

SEQ ID NO: 806927 - RNA, 20 nt, Artificial Sequence
  Synthetic
agcacuuugggagccugagg

SEQ ID NO: 806928 - RNA, 20 nt, Artificial Sequence
  Synthetic
acggaggguauggccugagg

SEQ ID NO: 806929 - RNA, 20 nt, Artificial Sequence
  Synthetic
agcuacucgggaagcugagg

SEQ ID NO: 806930 - RNA, 20 nt, Artificial Sequence
  Synthetic
agugcuuugggaagcugagg

SEQ ID NO: 806931 - RNA, 20 nt, Artificial Sequence
  Synthetic
aucuucucagaaggcugagg

SEQ ID NO: 806932 - RNA, 20 nt, Artificial Sequence
  Synthetic
cgaugaaguccaggcugagg

SEQ ID NO: 806933 - RNA, 20 nt, Artificial Sequence
  Synthetic
agcuacucaagaggcugagg

SEQ ID NO: 806934 - RNA, 20 nt, Artificial Sequence
  Synthetic
aacuacucaggaggcugagg

SEQ ID NO: 806935 - RNA, 20 nt, Artificial Sequence
  Synthetic
agcuacucaggaggcugagg

SEQ ID NO: 806936 - RNA, 20 nt, Artificial Sequence
  Synthetic
agcuacuuaggaggcugagg

SEQ ID NO: 806937 - RNA, 20 nt, Artificial Sequence
  Synthetic
agcuacccgggaggcugagg

SEQ ID NO: 806938 - RNA, 20 nt, Artificial Sequence
  Synthetic
agcuacucgggaggcugagg

SEQ ID NO: 806939 - RNA, 20 nt, Artificial Sequence
  Synthetic
agccacuugggaggcugagg

SEQ ID NO: 806940 - RNA, 20 nt, Artificial Sequence
  Synthetic
agcuacuugggaggcugagg

SEQ ID NO: 806941 - RNA, 20 nt, Artificial Sequence
  Synthetic
agcuauuugggaggcugagg

SEQ ID NO: 806942 - RNA, 20 nt, Artificial Sequence
  Synthetic
agcacuuugggaggcugagg

SEQ ID NO: 806943 - RNA, 20 nt, Artificial Sequence
  Synthetic
cgcacuuugggaggcugagg

SEQ ID NO: 806944 - RNA, 20 nt, Artificial Sequence
  Synthetic
aguacuuugggaggcugagg

SEQ ID NO: 806945 - RNA, 20 nt, Artificial Sequence
  Synthetic
agugcuuugggaggcugagg

SEQ ID NO: 806946 - RNA, 20 nt, Artificial Sequence
  Synthetic
uuuguuuugggaggcugagg

SEQ ID NO: 806947 - RNA, 20 nt, Artificial Sequence
  Synthetic
ucacguuaaguaggcugagg

SEQ ID NO: 806948 - RNA, 20 nt, Artificial Sequence
  Synthetic
uaagauuuucauugcugagg

SEQ ID NO: 806949 - RNA, 20 nt, Artificial Sequence
  Synthetic
uuugucgacuagcucugagg

SEQ ID NO: 806950 - RNA, 20 nt, Artificial Sequence
  Synthetic
aauacccuuagucucugagg

SEQ ID NO: 806951 - RNA, 20 nt, Artificial Sequence
  Synthetic
uuaagcaaucuucucugagg

SEQ ID NO: 806952 - RNA, 20 nt, Artificial Sequence
  Synthetic
agcuacaugggagucugagg

SEQ ID NO: 806953 - RNA, 20 nt, Artificial Sequence
  Synthetic
agcacuuugggagucugagg

SEQ ID NO: 806954 - RNA, 20 nt, Artificial Sequence
  Synthetic
cauuaacuucuggucugagg

SEQ ID NO: 806955 - RNA, 20 nt, Artificial Sequence
  Synthetic
aaaagagauugcuucugagg

SEQ ID NO: 806956 - RNA, 20 nt, Artificial Sequence
  Synthetic
ucgaauucuuucuucugagg

SEQ ID NO: 806957 - RNA, 20 nt, Artificial Sequence
  Synthetic
ucuggaacauaaaagugagg

SEQ ID NO: 806958 - RNA, 20 nt, Artificial Sequence
  Synthetic
agcuaagcuugaaagugagg

SEQ ID NO: 806959 - RNA, 20 nt, Artificial Sequence
  Synthetic
uagguuuggcuuaagugagg

SEQ ID NO: 806960 - RNA, 20 nt, Artificial Sequence
  Synthetic
ucgcccaggcuggagugagg

SEQ ID NO: 806961 - RNA, 20 nt, Artificial Sequence
  Synthetic
aagaaggagaaugagugagg

SEQ ID NO: 806962 - RNA, 20 nt, Artificial Sequence
  Synthetic
cuggagggcaacuagugagg

SEQ ID NO: 806963 - RNA, 20 nt, Artificial Sequence
  Synthetic
agucuuggaguguagugagg

SEQ ID NO: 806964 - RNA, 20 nt, Artificial Sequence
  Synthetic
ucaucuuugauuaggugagg

SEQ ID NO: 806965 - RNA, 20 nt, Artificial Sequence
  Synthetic
cauguugcggccgggugagg

SEQ ID NO: 806966 - RNA, 20 nt, Artificial Sequence
  Synthetic
cacuaccuugcugggugagg

SEQ ID NO: 806967 - RNA, 20 nt, Artificial Sequence
  Synthetic
agauaugggauugggugagg

SEQ ID NO: 806968 - RNA, 20 nt, Artificial Sequence
  Synthetic
uuauuuuuauaaaugugagg

SEQ ID NO: 806969 - RNA, 20 nt, Artificial Sequence
  Synthetic
ucccuguucauaaugugagg

SEQ ID NO: 806970 - RNA, 20 nt, Artificial Sequence
  Synthetic
uauuuuauuggccugugagg

SEQ ID NO: 806971 - RNA, 20 nt, Artificial Sequence
  Synthetic
aaagggaguuaucugugagg

SEQ ID NO: 806972 - RNA, 20 nt, Artificial Sequence
  Synthetic
uaucauauuacucugugagg

SEQ ID NO: 806973 - RNA, 20 nt, Artificial Sequence
  Synthetic
uuuuuguguauggugugagg

SEQ ID NO: 806974 - RNA, 20 nt, Artificial Sequence
  Synthetic
ugaauaccuuacuugugagg

SEQ ID NO: 806975 - RNA, 20 nt, Artificial Sequence
  Synthetic
uuuaaaugaaaaaauugagg

SEQ ID NO: 806976 - RNA, 20 nt, Artificial Sequence
  Synthetic
aaagaccauuugaauugagg

SEQ ID NO: 806977 - RNA, 20 nt, Artificial Sequence
  Synthetic
uucacagacaacacuugagg

SEQ ID NO: 806978 - RNA, 20 nt, Artificial Sequence
  Synthetic
cgguuccccagcccuugagg

SEQ ID NO: 806979 - RNA, 20 nt, Artificial Sequence
  Synthetic
uagccuuucaggccuugagg

SEQ ID NO: 806980 - RNA, 20 nt, Artificial Sequence
  Synthetic
uauucauauacuucuugagg

SEQ ID NO: 806981 - RNA, 20 nt, Artificial Sequence
  Synthetic
acuacuuuuuuuucuugagg

SEQ ID NO: 806982 - RNA, 20 nt, Artificial Sequence
  Synthetic
agauguguaagaaguugagg

SEQ ID NO: 806983 - RNA, 20 nt, Artificial Sequence
  Synthetic
uucaacauaggaauuugagg

SEQ ID NO: 806984 - RNA, 20 nt, Artificial Sequence
  Synthetic
uaagcuacugaguuuugagg

SEQ ID NO: 806985 - RNA, 20 nt, Artificial Sequence
  Synthetic
uuuuuuuuuuuuuuuugagg

SEQ ID NO: 806986 - RNA, 20 nt, Artificial Sequence
  Synthetic
uccagagucugaaaaauagg

SEQ ID NO: 806987 - RNA, 20 nt, Artificial Sequence
  Synthetic
aaauugaguaacaaaauagg

SEQ ID NO: 806988 - RNA, 20 nt, Artificial Sequence
  Synthetic
ucuuuauuucugaaaauagg

SEQ ID NO: 806989 - RNA, 20 nt, Artificial Sequence
  Synthetic
auagaaaaggaacaaauagg

SEQ ID NO: 806990 - RNA, 20 nt, Artificial Sequence
  Synthetic
ugggcuucuuaggcaauagg

SEQ ID NO: 806991 - RNA, 20 nt, Artificial Sequence
  Synthetic
aaaauaguaaaccgaauagg

SEQ ID NO: 806992 - RNA, 20 nt, Artificial Sequence
  Synthetic
ucucuugcuugcugaauagg

SEQ ID NO: 806993 - RNA, 20 nt, Artificial Sequence
  Synthetic
cccaucauccacauaauagg

SEQ ID NO: 806994 - RNA, 20 nt, Artificial Sequence
  Synthetic
cauuuuuuuuaacuaauagg

SEQ ID NO: 806995 - RNA, 20 nt, Artificial Sequence
  Synthetic
cacagugucuggcuaauagg

SEQ ID NO: 806996 - RNA, 20 nt, Artificial Sequence
  Synthetic
agcaaaggggucaacauagg

SEQ ID NO: 806997 - RNA, 20 nt, Artificial Sequence
  Synthetic
cagccauggccucacauagg

SEQ ID NO: 806998 - RNA, 20 nt, Artificial Sequence
  Synthetic
acggagauugaagacauagg

SEQ ID NO: 806999 - RNA, 20 nt, Artificial Sequence
  Synthetic
aauacuuaagauuacauagg

SEQ ID NO: 807000 - RNA, 20 nt, Artificial Sequence
  Synthetic
caacugcucuacuccauagg

SEQ ID NO: 807001 - RNA, 20 nt, Artificial Sequence
  Synthetic
cgcauguccucacucauagg

SEQ ID NO: 807002 - RNA, 20 nt, Artificial Sequence
  Synthetic
cgcauauucucacucauagg

SEQ ID NO: 807003 - RNA, 20 nt, Artificial Sequence
  Synthetic
ugcauauucucacucauagg

SEQ ID NO: 807004 - RNA, 20 nt, Artificial Sequence
  Synthetic
cgcauguucucacucauagg

SEQ ID NO: 807005 - RNA, 20 nt, Artificial Sequence
  Synthetic
cgcauguucucgcucauagg

SEQ ID NO: 807006 - RNA, 20 nt, Artificial Sequence
  Synthetic
uggauuuucaggcucauagg

SEQ ID NO: 807007 - RNA, 20 nt, Artificial Sequence
  Synthetic
cgcauauucucauucauagg

SEQ ID NO: 807008 - RNA, 20 nt, Artificial Sequence
  Synthetic
uuugcuuuuaggcagauagg

SEQ ID NO: 807009 - RNA, 20 nt, Artificial Sequence
  Synthetic
uauucuaugucauagauagg

SEQ ID NO: 807010 - RNA, 20 nt, Artificial Sequence
  Synthetic
aggagaaggagaacgauagg

SEQ ID NO: 807011 - RNA, 20 nt, Artificial Sequence
  Synthetic
aauuucacugugcugauagg

SEQ ID NO: 807012 - RNA, 20 nt, Artificial Sequence
  Synthetic
uuagagaaggagaauauagg

SEQ ID NO: 807013 - RNA, 20 nt, Artificial Sequence
  Synthetic
acaaagaaugaacauauagg

SEQ ID NO: 807014 - RNA, 20 nt, Artificial Sequence
  Synthetic
ucaaauauaaaucauauagg

SEQ ID NO: 807015 - RNA, 20 nt, Artificial Sequence
  Synthetic
aaaagauacaaagauauagg

SEQ ID NO: 807016 - RNA, 20 nt, Artificial Sequence
  Synthetic
ugaaaaauaagugcuauagg

SEQ ID NO: 807017 - RNA, 20 nt, Artificial Sequence
  Synthetic
aaucuguggaaagguauagg

SEQ ID NO: 807018 - RNA, 20 nt, Artificial Sequence
  Synthetic
aguaguuuuggggguauagg

SEQ ID NO: 807019 - RNA, 20 nt, Artificial Sequence
  Synthetic
ugucagugugaaauuauagg

SEQ ID NO: 807020 - RNA, 20 nt, Artificial Sequence
  Synthetic
ucacauuacagaauuauagg

SEQ ID NO: 807021 - RNA, 20 nt, Artificial Sequence
  Synthetic
uuaugauuaaguauuauagg

SEQ ID NO: 807022 - RNA, 20 nt, Artificial Sequence
  Synthetic
agaggaaagauuauuauagg

SEQ ID NO: 807023 - RNA, 20 nt, Artificial Sequence
  Synthetic
ugagucacagaaguuauagg

SEQ ID NO: 807024 - RNA, 20 nt, Artificial Sequence
  Synthetic
uuuuuggcaccuguuauagg

SEQ ID NO: 807025 - RNA, 20 nt, Artificial Sequence
  Synthetic
uuuugcuuuucuuuuauagg

SEQ ID NO: 807026 - RNA, 20 nt, Artificial Sequence
  Synthetic
auaagcaaaacaaaacuagg

SEQ ID NO: 807027 - RNA, 20 nt, Artificial Sequence
  Synthetic
cacaaaaagcagaaacuagg

SEQ ID NO: 807028 - RNA, 20 nt, Artificial Sequence
  Synthetic
ucuucuugauuuaaacuagg

SEQ ID NO: 807029 - RNA, 20 nt, Artificial Sequence
  Synthetic
uuauuuccuguuuaacuagg

SEQ ID NO: 807030 - RNA, 20 nt, Artificial Sequence
  Synthetic
acauggcuagcuacacuagg

SEQ ID NO: 807031 - RNA, 20 nt, Artificial Sequence
  Synthetic
auuuaaccccaugcacuagg

SEQ ID NO: 807032 - RNA, 20 nt, Artificial Sequence
  Synthetic
ugcacguuagaaucacuagg

SEQ ID NO: 807033 - RNA, 20 nt, Artificial Sequence
  Synthetic
ccuggcugguauauacuagg

SEQ ID NO: 807034 - RNA, 20 nt, Artificial Sequence
  Synthetic
uguaccuacacaaaccuagg

SEQ ID NO: 807035 - RNA, 20 nt, Artificial Sequence
  Synthetic
uuaccuuaaggcaaccuagg

SEQ ID NO: 807036 - RNA, 20 nt, Artificial Sequence
  Synthetic
aaaugagggagacaccuagg

SEQ ID NO: 807037 - RNA, 20 nt, Artificial Sequence
  Synthetic
aauggaugcuaucaccuagg

SEQ ID NO: 807038 - RNA, 20 nt, Artificial Sequence
  Synthetic
aguaacgguggagaccuagg

SEQ ID NO: 807039 - RNA, 20 nt, Artificial Sequence
  Synthetic
accuguuguucuacccuagg

SEQ ID NO: 807040 - RNA, 20 nt, Artificial Sequence
  Synthetic
auguuagccucuggccuagg

SEQ ID NO: 807041 - RNA, 20 nt, Artificial Sequence
  Synthetic
acagucagaacaauccuagg

SEQ ID NO: 807042 - RNA, 20 nt, Artificial Sequence
  Synthetic
aaaacuguaucucagcuagg

SEQ ID NO: 807043 - RNA, 20 nt, Artificial Sequence
  Synthetic
uuguaaauguugaggcuagg

SEQ ID NO: 807044 - RNA, 20 nt, Artificial Sequence
  Synthetic
caguaucuuauguggcuagg

SEQ ID NO: 807045 - RNA, 20 nt, Artificial Sequence
  Synthetic
cuuuugaauuuuaaucuagg

SEQ ID NO: 807046 - RNA, 20 nt, Artificial Sequence
  Synthetic
ucucacuugaaaacucuagg

SEQ ID NO: 807047 - RNA, 20 nt, Artificial Sequence
  Synthetic
aagaauuuaacuacucuagg

SEQ ID NO: 807048 - RNA, 20 nt, Artificial Sequence
  Synthetic
uauuuauuugaaucucuagg

SEQ ID NO: 807049 - RNA, 20 nt, Artificial Sequence
  Synthetic
auuggcauggcuucucuagg

SEQ ID NO: 807050 - RNA, 20 nt, Artificial Sequence
  Synthetic
cacagacccagaggucuagg

SEQ ID NO: 807051 - RNA, 20 nt, Artificial Sequence
  Synthetic
ugagagguuuagggucuagg

SEQ ID NO: 807052 - RNA, 20 nt, Artificial Sequence
  Synthetic
uugaaaaucacuggucuagg

SEQ ID NO: 807053 - RNA, 20 nt, Artificial Sequence
  Synthetic
acuggaugaagucuucuagg

SEQ ID NO: 807054 - RNA, 20 nt, Artificial Sequence
  Synthetic
uauuuaguuuugguucuagg

SEQ ID NO: 807055 - RNA, 20 nt, Artificial Sequence
  Synthetic
aggacauauugaaaaguagg

SEQ ID NO: 807056 - RNA, 20 nt, Artificial Sequence
  Synthetic
cuuugggaggccgaaguagg

SEQ ID NO: 807057 - RNA, 20 nt, Artificial Sequence
  Synthetic
cuuuccaugaaggcaguagg

SEQ ID NO: 807058 - RNA, 20 nt, Artificial Sequence
  Synthetic
cacuugaaccagggaguagg

SEQ ID NO: 807059 - RNA, 20 nt, Artificial Sequence
  Synthetic
uugugcuagcaaauaguagg

SEQ ID NO: 807060 - RNA, 20 nt, Artificial Sequence
  Synthetic
augucaaaaauaaagguagg

SEQ ID NO: 807061 - RNA, 20 nt, Artificial Sequence
  Synthetic
uaagaaggagacaagguagg

SEQ ID NO: 807062 - RNA, 20 nt, Artificial Sequence
  Synthetic
agauggguuggucagguagg

SEQ ID NO: 807063 - RNA, 20 nt, Artificial Sequence
  Synthetic
aggagaggaagagagguagg

SEQ ID NO: 807064 - RNA, 20 nt, Artificial Sequence
  Synthetic
cuuugggaggccgagguagg

SEQ ID NO: 807065 - RNA, 20 nt, Artificial Sequence
  Synthetic
acccaggaagcugagguagg

SEQ ID NO: 807066 - RNA, 20 nt, Artificial Sequence
  Synthetic
cacaaauaaagaaggguagg

SEQ ID NO: 807067 - RNA, 20 nt, Artificial Sequence
  Synthetic
cugaugcugggaaggguagg

SEQ ID NO: 807068 - RNA, 20 nt, Artificial Sequence
  Synthetic
aaaacacuuggaaggguagg

SEQ ID NO: 807069 - RNA, 20 nt, Artificial Sequence
  Synthetic
augguaggguggaggguagg

SEQ ID NO: 807070 - RNA, 20 nt, Artificial Sequence
  Synthetic
agggguggggguaggguagg

SEQ ID NO: 807071 - RNA, 20 nt, Artificial Sequence
  Synthetic
aauucuucccuugggguagg

SEQ ID NO: 807072 - RNA, 20 nt, Artificial Sequence
  Synthetic
ccauuuggauuugggguagg

SEQ ID NO: 807073 - RNA, 20 nt, Artificial Sequence
  Synthetic
agaacagucugguggguagg

SEQ ID NO: 807074 - RNA, 20 nt, Artificial Sequence
  Synthetic
cagggaaguaacaugguagg

SEQ ID NO: 807075 - RNA, 20 nt, Artificial Sequence
  Synthetic
cugggaaggguagugguagg

SEQ ID NO: 807076 - RNA, 20 nt, Artificial Sequence
  Synthetic
uaucgaaaacggaauguagg

SEQ ID NO: 807077 - RNA, 20 nt, Artificial Sequence
  Synthetic
auucuggguggcccuguagg

SEQ ID NO: 807078 - RNA, 20 nt, Artificial Sequence
  Synthetic
aaauaaaggagauuuguagg

SEQ ID NO: 807079 - RNA, 20 nt, Artificial Sequence
  Synthetic
caaaaaaaaaaaaaauuagg

SEQ ID NO: 807080 - RNA, 20 nt, Artificial Sequence
  Synthetic
cuuuaggaugcaaaauuagg

SEQ ID NO: 807081 - RNA, 20 nt, Artificial Sequence
  Synthetic
auagaauaccaagaauuagg

SEQ ID NO: 807082 - RNA, 20 nt, Artificial Sequence
  Synthetic
cuaaaaauacaaacauuagg

SEQ ID NO: 807083 - RNA, 20 nt, Artificial Sequence
  Synthetic
agcucuagaaguccauuagg

SEQ ID NO: 807084 - RNA, 20 nt, Artificial Sequence
  Synthetic
uauguggaaauaugauuagg

SEQ ID NO: 807085 - RNA, 20 nt, Artificial Sequence
  Synthetic
agauguuauaaauuauuagg

SEQ ID NO: 807086 - RNA, 20 nt, Artificial Sequence
  Synthetic
uguguugucuggcacuuagg

SEQ ID NO: 807087 - RNA, 20 nt, Artificial Sequence
  Synthetic
ugcuuuaagacagacuuagg

SEQ ID NO: 807088 - RNA, 20 nt, Artificial Sequence
  Synthetic
cuucuguaacaggacuuagg

SEQ ID NO: 807089 - RNA, 20 nt, Artificial Sequence
  Synthetic
cccucuuauaccuacuuagg

SEQ ID NO: 807090 - RNA, 20 nt, Artificial Sequence
  Synthetic
ugugaucccagcuacuuagg

SEQ ID NO: 807091 - RNA, 20 nt, Artificial Sequence
  Synthetic
uguaauuccagcaccuuagg

SEQ ID NO: 807092 - RNA, 20 nt, Artificial Sequence
  Synthetic
aaagucauaagggccuuagg

SEQ ID NO: 807093 - RNA, 20 nt, Artificial Sequence
  Synthetic
caggaaggaucauccuuagg

SEQ ID NO: 807094 - RNA, 20 nt, Artificial Sequence
  Synthetic
aaauuaauuuacuccuuagg

SEQ ID NO: 807095 - RNA, 20 nt, Artificial Sequence
  Synthetic
ucauucugcaugaucuuagg

SEQ ID NO: 807096 - RNA, 20 nt, Artificial Sequence
  Synthetic
cgcauguucucacucuuagg

SEQ ID NO: 807097 - RNA, 20 nt, Artificial Sequence
  Synthetic
ucaccuccuucucucuuagg

SEQ ID NO: 807098 - RNA, 20 nt, Artificial Sequence
  Synthetic
ucugagaugaaacaguuagg

SEQ ID NO: 807099 - RNA, 20 nt, Artificial Sequence
  Synthetic
cagggguuggaacaguuagg

SEQ ID NO: 807100 - RNA, 20 nt, Artificial Sequence
  Synthetic
uuuuauuacucccaguuagg

SEQ ID NO: 807101 - RNA, 20 nt, Artificial Sequence
  Synthetic
caacaaagcuaugaguuagg

SEQ ID NO: 807102 - RNA, 20 nt, Artificial Sequence
  Synthetic
aggugguaauguagguuagg

SEQ ID NO: 807103 - RNA, 20 nt, Artificial Sequence
  Synthetic
uuuaucaacaacugguuagg

SEQ ID NO: 807104 - RNA, 20 nt, Artificial Sequence
  Synthetic
ucugcuggccugugguuagg

SEQ ID NO: 807105 - RNA, 20 nt, Artificial Sequence
  Synthetic
uuagggcgaaguguguuagg

SEQ ID NO: 807106 - RNA, 20 nt, Artificial Sequence
  Synthetic
cagaaaaaaaaaaauuuagg

SEQ ID NO: 807107 - RNA, 20 nt, Artificial Sequence
  Synthetic
augauacuuuggaauuuagg

SEQ ID NO: 807108 - RNA, 20 nt, Artificial Sequence
  Synthetic
aagaaagcugauaauuuagg

SEQ ID NO: 807109 - RNA, 20 nt, Artificial Sequence
  Synthetic
uugggaaacagcgauuuagg

SEQ ID NO: 807110 - RNA, 20 nt, Artificial Sequence
  Synthetic
uuauuugaguauuauuuagg

SEQ ID NO: 807111 - RNA, 20 nt, Artificial Sequence
  Synthetic
ugaaaucccagcacuuuagg

SEQ ID NO: 807112 - RNA, 20 nt, Artificial Sequence
  Synthetic
augauuugaaugccuuuagg

SEQ ID NO: 807113 - RNA, 20 nt, Artificial Sequence
  Synthetic
uaaggggugggagcuuuagg

SEQ ID NO: 807114 - RNA, 20 nt, Artificial Sequence
  Synthetic
aguacaucgauugcuuuagg

SEQ ID NO: 807115 - RNA, 20 nt, Artificial Sequence
  Synthetic
uuuaggccucauucuuuagg

SEQ ID NO: 807116 - RNA, 20 nt, Artificial Sequence
  Synthetic
uagcagguuaagauuuuagg

SEQ ID NO: 807117 - RNA, 20 nt, Artificial Sequence
  Synthetic
uugauaggguauauuuuagg

SEQ ID NO: 807118 - RNA, 20 nt, Artificial Sequence
  Synthetic
aucugaaacaaaguuuuagg

SEQ ID NO: 807119 - RNA, 20 nt, Artificial Sequence
  Synthetic
uaggaauaagauguuuuagg

SEQ ID NO: 807120 - RNA, 20 nt, Artificial Sequence
  Synthetic
uuuauaagauaauuuuuagg

SEQ ID NO: 807121 - RNA, 20 nt, Artificial Sequence
  Synthetic
uggccugagugauuuuuagg

SEQ ID NO: 807122 - RNA, 20 nt, Artificial Sequence
  Synthetic
aaaugacaucccuuuuuagg

SEQ ID NO: 807123 - RNA, 20 nt, Artificial Sequence
  Synthetic
aguauuuugagguuuuuagg

SEQ ID NO: 807124 - RNA, 20 nt, Artificial Sequence
  Synthetic
uauuguuguguugcaaacgg

SEQ ID NO: 807125 - RNA, 20 nt, Artificial Sequence
  Synthetic
agagccacauggagaaacgg

SEQ ID NO: 807126 - RNA, 20 nt, Artificial Sequence
  Synthetic
auacucagauggagaaacgg

SEQ ID NO: 807127 - RNA, 20 nt, Artificial Sequence
  Synthetic
aaucacaucauggagaacgg

SEQ ID NO: 807128 - RNA, 20 nt, Artificial Sequence
  Synthetic
aaaagcaugcuugggaacgg

SEQ ID NO: 807129 - RNA, 20 nt, Artificial Sequence
  Synthetic
agaauaagaagguggaacgg

SEQ ID NO: 807130 - RNA, 20 nt, Artificial Sequence
  Synthetic
cauaaggaaggaaauaacgg

SEQ ID NO: 807131 - RNA, 20 nt, Artificial Sequence
  Synthetic
cagaaauuuguaaauaacgg

SEQ ID NO: 807132 - RNA, 20 nt, Artificial Sequence
  Synthetic
agauauaucacagcuaacgg

SEQ ID NO: 807133 - RNA, 20 nt, Artificial Sequence
  Synthetic
agaagcauugucaguaacgg

SEQ ID NO: 807134 - RNA, 20 nt, Artificial Sequence
  Synthetic
agguuugcuggggaacacgg

SEQ ID NO: 807135 - RNA, 20 nt, Artificial Sequence
  Synthetic
uggcuguuccaugcacacgg

SEQ ID NO: 807136 - RNA, 20 nt, Artificial Sequence
  Synthetic
agcuagaggacugcacacgg

SEQ ID NO: 807137 - RNA, 20 nt, Artificial Sequence
  Synthetic
uagguauacauuugccacgg

SEQ ID NO: 807138 - RNA, 20 nt, Artificial Sequence
  Synthetic
aggucagacagguuccacgg

SEQ ID NO: 807139 - RNA, 20 nt, Artificial Sequence
  Synthetic
cagagggcgcagaagcacgg

SEQ ID NO: 807140 - RNA, 20 nt, Artificial Sequence
  Synthetic
aaaggagaggccaggcacgg

SEQ ID NO: 807141 - RNA, 20 nt, Artificial Sequence
  Synthetic
uaagcuugggccaggcacgg

SEQ ID NO: 807142 - RNA, 20 nt, Artificial Sequence
  Synthetic
cucccagucaggaggcacgg

SEQ ID NO: 807143 - RNA, 20 nt, Artificial Sequence
  Synthetic
cuccugcaggcccggcacgg

SEQ ID NO: 807144 - RNA, 20 nt, Artificial Sequence
  Synthetic
auauuggcagccgggcacgg

SEQ ID NO: 807145 - RNA, 20 nt, Artificial Sequence
  Synthetic
aaaaaauuagcugggcacgg

SEQ ID NO: 807146 - RNA, 20 nt, Artificial Sequence
  Synthetic
aaaagucuugcugggcacgg

SEQ ID NO: 807147 - RNA, 20 nt, Artificial Sequence
  Synthetic
aggcacucuucugggcacgg

SEQ ID NO: 807148 - RNA, 20 nt, Artificial Sequence
  Synthetic
agacagguggccuggcacgg

SEQ ID NO: 807149 - RNA, 20 nt, Artificial Sequence
  Synthetic
cagucagugccugugcacgg

SEQ ID NO: 807150 - RNA, 20 nt, Artificial Sequence
  Synthetic
auuuagucauuuuugcacgg

SEQ ID NO: 807151 - RNA, 20 nt, Artificial Sequence
  Synthetic
uggagauaauugaaucacgg

SEQ ID NO: 807152 - RNA, 20 nt, Artificial Sequence
  Synthetic
acccucaccuccacagacgg

SEQ ID NO: 807153 - RNA, 20 nt, Artificial Sequence
  Synthetic
uguauuuuuaguagagacgg

SEQ ID NO: 807154 - RNA, 20 nt, Artificial Sequence
  Synthetic
uaucaguaaaguggggacgg

SEQ ID NO: 807155 - RNA, 20 nt, Artificial Sequence
  Synthetic
cuuguggaagacuuugacgg

SEQ ID NO: 807156 - RNA, 20 nt, Artificial Sequence
  Synthetic
uuuucuccucuguaauacgg

SEQ ID NO: 807157 - RNA, 20 nt, Artificial Sequence
  Synthetic
cacuuccauaacagauacgg

SEQ ID NO: 807158 - RNA, 20 nt, Artificial Sequence
  Synthetic
auucugauaaugaccuacgg

SEQ ID NO: 807159 - RNA, 20 nt, Artificial Sequence
  Synthetic
uuuacuucuuacaguuacgg

SEQ ID NO: 807160 - RNA, 20 nt, Artificial Sequence
  Synthetic
cgagaccacgaacccaccgg

SEQ ID NO: 807161 - RNA, 20 nt, Artificial Sequence
  Synthetic
cuaugaguaaaagcucccgg

SEQ ID NO: 807162 - RNA, 20 nt, Artificial Sequence
  Synthetic
aacauacaaauuuuagccgg

SEQ ID NO: 807163 - RNA, 20 nt, Artificial Sequence
  Synthetic
ccagaguugguucccgccgg

SEQ ID NO: 807164 - RNA, 20 nt, Artificial Sequence
  Synthetic
caucuagaacuguaauccgg

SEQ ID NO: 807165 - RNA, 20 nt, Artificial Sequence
  Synthetic
ucagagcuaaguaacuccgg

SEQ ID NO: 807166 - RNA, 20 nt, Artificial Sequence
  Synthetic
aucuagaguaaggacuccgg

SEQ ID NO: 807167 - RNA, 20 nt, Artificial Sequence
  Synthetic
uuauuugaaaaccauuccgg

SEQ ID NO: 807168 - RNA, 20 nt, Artificial Sequence
  Synthetic
uacaccuuucccacuuccgg

SEQ ID NO: 807169 - RNA, 20 nt, Artificial Sequence
  Synthetic
ccaugauuguaaguuuccgg

SEQ ID NO: 807170 - RNA, 20 nt, Artificial Sequence
  Synthetic
uaacuuguuucucaaagcgg

SEQ ID NO: 807171 - RNA, 20 nt, Artificial Sequence
  Synthetic
auuacucaugaguaaagcgg

SEQ ID NO: 807172 - RNA, 20 nt, Artificial Sequence
  Synthetic
agagagagagagagaagcgg

SEQ ID NO: 807173 - RNA, 20 nt, Artificial Sequence
  Synthetic
cacuugaccccaggaagcgg

SEQ ID NO: 807174 - RNA, 20 nt, Artificial Sequence
  Synthetic
ugagcuggagcagggagcgg

SEQ ID NO: 807175 - RNA, 20 nt, Artificial Sequence
  Synthetic
agcaaucuggccgggagcgg

SEQ ID NO: 807176 - RNA, 20 nt, Artificial Sequence
  Synthetic
aguaugucuuuugggagcgg

SEQ ID NO: 807177 - RNA, 20 nt, Artificial Sequence
  Synthetic
ucagugaaaaggaugagcgg

SEQ ID NO: 807178 - RNA, 20 nt, Artificial Sequence
  Synthetic
caccugaaccugggacgcgg

SEQ ID NO: 807179 - RNA, 20 nt, Artificial Sequence
  Synthetic
aauaaaugggccaggcgcgg

SEQ ID NO: 807180 - RNA, 20 nt, Artificial Sequence
  Synthetic
aagaaguuggccaggcgcgg

SEQ ID NO: 807181 - RNA, 20 nt, Artificial Sequence
  Synthetic
aaaauagcagccgggcgcgg

SEQ ID NO: 807182 - RNA, 20 nt, Artificial Sequence
  Synthetic
aauguacaggccgggcgcgg

SEQ ID NO: 807183 - RNA, 20 nt, Artificial Sequence
  Synthetic
aauggugaggccgggcgcgg

SEQ ID NO: 807184 - RNA, 20 nt, Artificial Sequence
  Synthetic
agcauugcggccgggcgcgg

SEQ ID NO: 807185 - RNA, 20 nt, Artificial Sequence
  Synthetic
aacucaucggccgggcgcgg

SEQ ID NO: 807186 - RNA, 20 nt, Artificial Sequence
  Synthetic
aguuacucggccgggcgcgg

SEQ ID NO: 807187 - RNA, 20 nt, Artificial Sequence
  Synthetic
aucaucugggccgggcgcgg

SEQ ID NO: 807188 - RNA, 20 nt, Artificial Sequence
  Synthetic
aaacucugggccgggcgcgg

SEQ ID NO: 807189 - RNA, 20 nt, Artificial Sequence
  Synthetic
uaagagcuggccgggcgcgg

SEQ ID NO: 807190 - RNA, 20 nt, Artificial Sequence
  Synthetic
aucacucuggccgggcgcgg

SEQ ID NO: 807191 - RNA, 20 nt, Artificial Sequence
  Synthetic
auguuuuuggccgggcgcgg

SEQ ID NO: 807192 - RNA, 20 nt, Artificial Sequence
  Synthetic
uucuuggcugccgggcgcgg

SEQ ID NO: 807193 - RNA, 20 nt, Artificial Sequence
  Synthetic
aaguuugcgacugggcgcgg

SEQ ID NO: 807194 - RNA, 20 nt, Artificial Sequence
  Synthetic
cugucucaggcugggcgcgg

SEQ ID NO: 807195 - RNA, 20 nt, Artificial Sequence
  Synthetic
auuuuggaggcugggcgcgg

SEQ ID NO: 807196 - RNA, 20 nt, Artificial Sequence
  Synthetic
auuauuuaggcugggcgcgg

SEQ ID NO: 807197 - RNA, 20 nt, Artificial Sequence
  Synthetic
aauucacgggcugggcgcgg

SEQ ID NO: 807198 - RNA, 20 nt, Artificial Sequence
  Synthetic
aacgcuuuggcugggcgcgg

SEQ ID NO: 807199 - RNA, 20 nt, Artificial Sequence
  Synthetic
cuccugaacccagcaggcgg

SEQ ID NO: 807200 - RNA, 20 nt, Artificial Sequence
  Synthetic
cgcuugaacccgagaggcgg

SEQ ID NO: 807201 - RNA, 20 nt, Artificial Sequence
  Synthetic
aggcuaggaaggagaggcgg

SEQ ID NO: 807202 - RNA, 20 nt, Artificial Sequence
  Synthetic
cgcuugaacccacgaggcgg

SEQ ID NO: 807203 - RNA, 20 nt, Artificial Sequence
  Synthetic
uugcuugaaccaggaggcgg

SEQ ID NO: 807204 - RNA, 20 nt, Artificial Sequence
  Synthetic
cacuggaacccaggaggcgg

SEQ ID NO: 807205 - RNA, 20 nt, Artificial Sequence
  Synthetic
cccuugaacccaggaggcgg

SEQ ID NO: 807206 - RNA, 20 nt, Artificial Sequence
  Synthetic
cgcuugaacccaggaggcgg

SEQ ID NO: 807207 - RNA, 20 nt, Artificial Sequence
  Synthetic
ugcuugaacccaggaggcgg

SEQ ID NO: 807208 - RNA, 20 nt, Artificial Sequence
  Synthetic
cucuugaacccaggaggcgg

SEQ ID NO: 807209 - RNA, 20 nt, Artificial Sequence
  Synthetic
cauuugaacccaggaggcgg

SEQ ID NO: 807210 - RNA, 20 nt, Artificial Sequence
  Synthetic
ugcucgaacccgggaggcgg

SEQ ID NO: 807211 - RNA, 20 nt, Artificial Sequence
  Synthetic
agcuugaacccgggaggcgg

SEQ ID NO: 807212 - RNA, 20 nt, Artificial Sequence
  Synthetic
cgcuugaacccgggaggcgg

SEQ ID NO: 807213 - RNA, 20 nt, Artificial Sequence
  Synthetic
ugcuugaacccgggaggcgg

SEQ ID NO: 807214 - RNA, 20 nt, Artificial Sequence
  Synthetic
cacuugaagccgggaggcgg

SEQ ID NO: 807215 - RNA, 20 nt, Artificial Sequence
  Synthetic
cacuugaaccugggaggcgg

SEQ ID NO: 807216 - RNA, 20 nt, Artificial Sequence
  Synthetic
ugcuugaaccugggaggcgg

SEQ ID NO: 807217 - RNA, 20 nt, Artificial Sequence
  Synthetic
cgcuugaacuugggaggcgg

SEQ ID NO: 807218 - RNA, 20 nt, Artificial Sequence
  Synthetic
cccaguuauuugggaggcgg

SEQ ID NO: 807219 - RNA, 20 nt, Artificial Sequence
  Synthetic
ucccuugaaccuggaggcgg

SEQ ID NO: 807220 - RNA, 20 nt, Artificial Sequence
  Synthetic
auacaaauuuuagccggcgg

SEQ ID NO: 807221 - RNA, 20 nt, Artificial Sequence
  Synthetic
uuaucucugaguaagggcgg

SEQ ID NO: 807222 - RNA, 20 nt, Artificial Sequence
  Synthetic
agaggguggagguugggcgg

SEQ ID NO: 807223 - RNA, 20 nt, Artificial Sequence
  Synthetic
cucaccauucuacauggcgg

SEQ ID NO: 807224 - RNA, 20 nt, Artificial Sequence
  Synthetic
cgcuugaaccuagguggcgg

SEQ ID NO: 807225 - RNA, 20 nt, Artificial Sequence
  Synthetic
auuccugguugggguggcgg

SEQ ID NO: 807226 - RNA, 20 nt, Artificial Sequence
  Synthetic
acauucaccagguguggcgg

SEQ ID NO: 807227 - RNA, 20 nt, Artificial Sequence
  Synthetic
cugucugaugcagaaugcgg

SEQ ID NO: 807228 - RNA, 20 nt, Artificial Sequence
  Synthetic
uauugauuguuucacugcgg

SEQ ID NO: 807229 - RNA, 20 nt, Artificial Sequence
  Synthetic
uugcccaggcuggagugcgg

SEQ ID NO: 807230 - RNA, 20 nt, Artificial Sequence
  Synthetic
acaaucucaaccaggugcgg

SEQ ID NO: 807231 - RNA, 20 nt, Artificial Sequence
  Synthetic
aaaaucucagccaggugcgg

SEQ ID NO: 807232 - RNA, 20 nt, Artificial Sequence
  Synthetic
agauucauggccaggugcgg

SEQ ID NO: 807233 - RNA, 20 nt, Artificial Sequence
  Synthetic
cuugagauggccaggugcgg

SEQ ID NO: 807234 - RNA, 20 nt, Artificial Sequence
  Synthetic
accuuccagggcaggugcgg

SEQ ID NO: 807235 - RNA, 20 nt, Artificial Sequence
  Synthetic
aauuuuuuggccgggugcgg

SEQ ID NO: 807236 - RNA, 20 nt, Artificial Sequence
  Synthetic
augauauaggcugggugcgg

SEQ ID NO: 807237 - RNA, 20 nt, Artificial Sequence
  Synthetic
agcuaugcggcugggugcgg

SEQ ID NO: 807238 - RNA, 20 nt, Artificial Sequence
  Synthetic
aagcagugggcugggugcgg

SEQ ID NO: 807239 - RNA, 20 nt, Artificial Sequence
  Synthetic
uuuuaggaggcugguugcgg

SEQ ID NO: 807240 - RNA, 20 nt, Artificial Sequence
  Synthetic
uccuggucugcauguugcgg

SEQ ID NO: 807241 - RNA, 20 nt, Artificial Sequence
  Synthetic
aggugaacugcauuuugcgg

SEQ ID NO: 807242 - RNA, 20 nt, Artificial Sequence
  Synthetic
agaagagcuaauauaaucgg

SEQ ID NO: 807243 - RNA, 20 nt, Artificial Sequence
  Synthetic
aguucuacuucauccaucgg

SEQ ID NO: 807244 - RNA, 20 nt, Artificial Sequence
  Synthetic
uguuugguagaauucaucgg

SEQ ID NO: 807245 - RNA, 20 nt, Artificial Sequence
  Synthetic
uuguauuucugugggaucgg

SEQ ID NO: 807246 - RNA, 20 nt, Artificial Sequence
  Synthetic
uugauugauggauggaucgg

SEQ ID NO: 807247 - RNA, 20 nt, Artificial Sequence
  Synthetic
ccccaguggcucuguaucgg

SEQ ID NO: 807248 - RNA, 20 nt, Artificial Sequence
  Synthetic
uuuuaaucccagcuacucgg

SEQ ID NO: 807249 - RNA, 20 nt, Artificial Sequence
  Synthetic
uuuguuguagaauuacucgg

SEQ ID NO: 807250 - RNA, 20 nt, Artificial Sequence
  Synthetic
uaguuggcuuaauaccucgg

SEQ ID NO: 807251 - RNA, 20 nt, Artificial Sequence
  Synthetic
ccccagcccccaauccucgg

SEQ ID NO: 807252 - RNA, 20 nt, Artificial Sequence
  Synthetic
uuguaauuggugaaucucgg

SEQ ID NO: 807253 - RNA, 20 nt, Artificial Sequence
  Synthetic
uucuaaacuuuuauucucgg

SEQ ID NO: 807254 - RNA, 20 nt, Artificial Sequence
  Synthetic
cgcuugagccagggagucgg

SEQ ID NO: 807255 - RNA, 20 nt, Artificial Sequence
  Synthetic
agggccuguuguggggucgg

SEQ ID NO: 807256 - RNA, 20 nt, Artificial Sequence
  Synthetic
cuagaaaacaacuaugucgg

SEQ ID NO: 807257 - RNA, 20 nt, Artificial Sequence
  Synthetic
cacacacugaggccugucgg

SEQ ID NO: 807258 - RNA, 20 nt, Artificial Sequence
  Synthetic
uuguauuucuguggugucgg

SEQ ID NO: 807259 - RNA, 20 nt, Artificial Sequence
  Synthetic
cauuucaauauaagauucgg

SEQ ID NO: 807260 - RNA, 20 nt, Artificial Sequence
  Synthetic
uauuaucccagguacuucgg

SEQ ID NO: 807261 - RNA, 20 nt, Artificial Sequence
  Synthetic
aaaacaaaacauugcuucgg

SEQ ID NO: 807262 - RNA, 20 nt, Artificial Sequence
  Synthetic
uucguaaaacuuugguucgg

SEQ ID NO: 807263 - RNA, 20 nt, Artificial Sequence
  Synthetic
ccuaaauuauucauguucgg

SEQ ID NO: 807264 - RNA, 20 nt, Artificial Sequence
  Synthetic
cuaguguuuucuuuguucgg

SEQ ID NO: 807265 - RNA, 20 nt, Artificial Sequence
  Synthetic
uguaauccccgcacuuucgg

SEQ ID NO: 807266 - RNA, 20 nt, Artificial Sequence
  Synthetic
uuugaaaagaaagcuuucgg

SEQ ID NO: 807267 - RNA, 20 nt, Artificial Sequence
  Synthetic
ucuggcagcagauuuuucgg

SEQ ID NO: 807268 - RNA, 20 nt, Artificial Sequence
  Synthetic
aauagaagaaagaaaaaggg

SEQ ID NO: 807269 - RNA, 20 nt, Artificial Sequence
  Synthetic
auuugcuuaauuaaaaaggg

SEQ ID NO: 807270 - RNA, 20 nt, Artificial Sequence
  Synthetic
uagcacaaaagccaaaaggg

SEQ ID NO: 807271 - RNA, 20 nt, Artificial Sequence
  Synthetic
aacaugcagaaagaaaaggg

SEQ ID NO: 807272 - RNA, 20 nt, Artificial Sequence
  Synthetic
caaggagaauaugaaaaggg

SEQ ID NO: 807273 - RNA, 20 nt, Artificial Sequence
  Synthetic
aaagcaaggcaauaaaaggg

SEQ ID NO: 807274 - RNA, 20 nt, Artificial Sequence
  Synthetic
ccuuaaaaccaagcaaaggg

SEQ ID NO: 807275 - RNA, 20 nt, Artificial Sequence
  Synthetic
uaaccugcuuaggcaaaggg

SEQ ID NO: 807276 - RNA, 20 nt, Artificial Sequence
  Synthetic
cuuagguauggggcaaaggg

SEQ ID NO: 807277 - RNA, 20 nt, Artificial Sequence
  Synthetic
uauauaccuaaaucaaaggg

SEQ ID NO: 807278 - RNA, 20 nt, Artificial Sequence
  Synthetic
ccuguggcaaccucaaaggg

SEQ ID NO: 807279 - RNA, 20 nt, Artificial Sequence
  Synthetic
uuagcugaguauagaaaggg

SEQ ID NO: 807280 - RNA, 20 nt, Artificial Sequence
  Synthetic
cggaagcaggagggaaaggg

SEQ ID NO: 807281 - RNA, 20 nt, Artificial Sequence
  Synthetic
cacaaaaaaaggggaaaggg

SEQ ID NO: 807282 - RNA, 20 nt, Artificial Sequence
  Synthetic
uguacacugcugggaaaggg

SEQ ID NO: 807283 - RNA, 20 nt, Artificial Sequence
  Synthetic
ucuuuguugaauggaaaggg

SEQ ID NO: 807284 - RNA, 20 nt, Artificial Sequence
  Synthetic
uugaggguauucugaaaggg

SEQ ID NO: 807285 - RNA, 20 nt, Artificial Sequence
  Synthetic
ugggugugacaauuaaaggg

SEQ ID NO: 807286 - RNA, 20 nt, Artificial Sequence
  Synthetic
uaucagagucucuuaaaggg

SEQ ID NO: 807287 - RNA, 20 nt, Artificial Sequence
  Synthetic
aaacaagacaaaaacaaggg

SEQ ID NO: 807288 - RNA, 20 nt, Artificial Sequence
  Synthetic
aguacuaaguuaaacaaggg

SEQ ID NO: 807289 - RNA, 20 nt, Artificial Sequence
  Synthetic
cucucugaauugaacaaggg

SEQ ID NO: 807290 - RNA, 20 nt, Artificial Sequence
  Synthetic
ugcuguggggaacacaaggg

SEQ ID NO: 807291 - RNA, 20 nt, Artificial Sequence
  Synthetic
ccuccaaauaguaccaaggg

SEQ ID NO: 807292 - RNA, 20 nt, Artificial Sequence
  Synthetic
ugagugaugacuuccaaggg

SEQ ID NO: 807293 - RNA, 20 nt, Artificial Sequence
  Synthetic
auaagaaaaugaagcaaggg

SEQ ID NO: 807294 - RNA, 20 nt, Artificial Sequence
  Synthetic
cuuaaaugaucuagcaaggg

SEQ ID NO: 807295 - RNA, 20 nt, Artificial Sequence
  Synthetic
uguacuuccuggcucaaggg

SEQ ID NO: 807296 - RNA, 20 nt, Artificial Sequence
  Synthetic
uaauccccacaugucaaggg

SEQ ID NO: 807297 - RNA, 20 nt, Artificial Sequence
  Synthetic
auggaggaagaaaagaaggg

SEQ ID NO: 807298 - RNA, 20 nt, Artificial Sequence
  Synthetic
aaggagagaacaaagaaggg

SEQ ID NO: 807299 - RNA, 20 nt, Artificial Sequence
  Synthetic
aauaaguguucauagaaggg

SEQ ID NO: 807300 - RNA, 20 nt, Artificial Sequence
  Synthetic
cuaccccugccuuagaaggg

SEQ ID NO: 807301 - RNA, 20 nt, Artificial Sequence
  Synthetic
aauuaaaaaaaaaggaaggg

SEQ ID NO: 807302 - RNA, 20 nt, Artificial Sequence
  Synthetic
agguagaaagaaaggaaggg

SEQ ID NO: 807303 - RNA, 20 nt, Artificial Sequence
  Synthetic
acaaagaaaggaaggaaggg

SEQ ID NO: 807304 - RNA, 20 nt, Artificial Sequence
  Synthetic
aaaggaggaggaaggaaggg

SEQ ID NO: 807305 - RNA, 20 nt, Artificial Sequence
  Synthetic
auucaagguuagaggaaggg

SEQ ID NO: 807306 - RNA, 20 nt, Artificial Sequence
  Synthetic
uccuuuaaauaagggaaggg

SEQ ID NO: 807307 - RNA, 20 nt, Artificial Sequence
  Synthetic
uuggccuggggauggaaggg

SEQ ID NO: 807308 - RNA, 20 nt, Artificial Sequence
  Synthetic
cucuuccuacaguggaaggg

SEQ ID NO: 807309 - RNA, 20 nt, Artificial Sequence
  Synthetic
acuaggagcugguugaaggg

SEQ ID NO: 807310 - RNA, 20 nt, Artificial Sequence
  Synthetic
acaaaaagaguguugaaggg

SEQ ID NO: 807311 - RNA, 20 nt, Artificial Sequence
  Synthetic
cucugcaucaauaauaaggg

SEQ ID NO: 807312 - RNA, 20 nt, Artificial Sequence
  Synthetic
ucuucccuuucuuauaaggg

SEQ ID NO: 807313 - RNA, 20 nt, Artificial Sequence
  Synthetic
acaguauucugagcuaaggg

SEQ ID NO: 807314 - RNA, 20 nt, Artificial Sequence
  Synthetic
ucuuuaucucugaguaaggg

SEQ ID NO: 807315 - RNA, 20 nt, Artificial Sequence
  Synthetic
ucuguggaugggauuaaggg

SEQ ID NO: 807316 - RNA, 20 nt, Artificial Sequence
  Synthetic
cuaaauguuaauauuaaggg

SEQ ID NO: 807317 - RNA, 20 nt, Artificial Sequence
  Synthetic
uauuuuucaauuauuaaggg

SEQ ID NO: 807318 - RNA, 20 nt, Artificial Sequence
  Synthetic
ccaggccaucucaaacaggg

SEQ ID NO: 807319 - RNA, 20 nt, Artificial Sequence
  Synthetic
cuaggaaaauucaaacaggg

SEQ ID NO: 807320 - RNA, 20 nt, Artificial Sequence
  Synthetic
uagggcuggaggacacaggg

SEQ ID NO: 807321 - RNA, 20 nt, Artificial Sequence
  Synthetic
uugcugcuuuaagcacaggg

SEQ ID NO: 807322 - RNA, 20 nt, Artificial Sequence
  Synthetic
cagagauuggaugcacaggg

SEQ ID NO: 807323 - RNA, 20 nt, Artificial Sequence
  Synthetic
cuuucaucuuaaucacaggg

SEQ ID NO: 807324 - RNA, 20 nt, Artificial Sequence
  Synthetic
accucuggauaaggacaggg

SEQ ID NO: 807325 - RNA, 20 nt, Artificial Sequence
  Synthetic
augguugccagggaccaggg

SEQ ID NO: 807326 - RNA, 20 nt, Artificial Sequence
  Synthetic
aggaucaucugagcccaggg

SEQ ID NO: 807327 - RNA, 20 nt, Artificial Sequence
  Synthetic
aauaaaucagggagccaggg

SEQ ID NO: 807328 - RNA, 20 nt, Artificial Sequence
  Synthetic
cacaaccuaugccuccaggg

SEQ ID NO: 807329 - RNA, 20 nt, Artificial Sequence
  Synthetic
augggugauaaaaagcaggg

SEQ ID NO: 807330 - RNA, 20 nt, Artificial Sequence
  Synthetic
cuaggcugcacauagcaggg

SEQ ID NO: 807331 - RNA, 20 nt, Artificial Sequence
  Synthetic
cugagaguggcuuagcaggg

SEQ ID NO: 807332 - RNA, 20 nt, Artificial Sequence
  Synthetic
aucuuaugggccgggcaggg

SEQ ID NO: 807333 - RNA, 20 nt, Artificial Sequence
  Synthetic
ccaggauguacauggcaggg

SEQ ID NO: 807334 - RNA, 20 nt, Artificial Sequence
  Synthetic
ucaaguuaagcaaugcaggg

SEQ ID NO: 807335 - RNA, 20 nt, Artificial Sequence
  Synthetic
uauucaauuaaagugcaggg

SEQ ID NO: 807336 - RNA, 20 nt, Artificial Sequence
  Synthetic
augcuuacuguccaucaggg

SEQ ID NO: 807337 - RNA, 20 nt, Artificial Sequence
  Synthetic
aggugacuggaucaucaggg

SEQ ID NO: 807338 - RNA, 20 nt, Artificial Sequence
  Synthetic
uggcugcugauugaucaggg

SEQ ID NO: 807339 - RNA, 20 nt, Artificial Sequence
  Synthetic
agaggguggugcacucaggg

SEQ ID NO: 807340 - RNA, 20 nt, Artificial Sequence
  Synthetic
aggaaagaagaaagucaggg

SEQ ID NO: 807341 - RNA, 20 nt, Artificial Sequence
  Synthetic
ugacccuaccucagucaggg

SEQ ID NO: 807342 - RNA, 20 nt, Artificial Sequence
  Synthetic
cuaaaacauagaugucaggg

SEQ ID NO: 807343 - RNA, 20 nt, Artificial Sequence
  Synthetic
ugaggagcgaugugucaggg

SEQ ID NO: 807344 - RNA, 20 nt, Artificial Sequence
  Synthetic
cuauucauuucauuucaggg

SEQ ID NO: 807345 - RNA, 20 nt, Artificial Sequence
  Synthetic
ucagaauauggauuucaggg

SEQ ID NO: 807346 - RNA, 20 nt, Artificial Sequence
  Synthetic
uggccauucuguuuucaggg

SEQ ID NO: 807347 - RNA, 20 nt, Artificial Sequence
  Synthetic
aagaaaaaaaagaaagaggg

SEQ ID NO: 807348 - RNA, 20 nt, Artificial Sequence
  Synthetic
ucauuggaaguccaagaggg

SEQ ID NO: 807349 - RNA, 20 nt, Artificial Sequence
  Synthetic
cuuaaaauuuauuaagaggg

SEQ ID NO: 807350 - RNA, 20 nt, Artificial Sequence
  Synthetic
aauuuauuagagacagaggg

SEQ ID NO: 807351 - RNA, 20 nt, Artificial Sequence
  Synthetic
ucagaugagcccccagaggg

SEQ ID NO: 807352 - RNA, 20 nt, Artificial Sequence
  Synthetic
aacauauaaacuccagaggg

SEQ ID NO: 807353 - RNA, 20 nt, Artificial Sequence
  Synthetic
aaggcaacuguggcagaggg

SEQ ID NO: 807354 - RNA, 20 nt, Artificial Sequence
  Synthetic
caauggggccuaucagaggg

SEQ ID NO: 807355 - RNA, 20 nt, Artificial Sequence
  Synthetic
agagagagagagagagaggg

SEQ ID NO: 807356 - RNA, 20 nt, Artificial Sequence
  Synthetic
acaaguggagagagagaggg

SEQ ID NO: 807357 - RNA, 20 nt, Artificial Sequence
  Synthetic
agggaggaagggagagaggg

SEQ ID NO: 807358 - RNA, 20 nt, Artificial Sequence
  Synthetic
agaagagaggcaggagaggg

SEQ ID NO: 807359 - RNA, 20 nt, Artificial Sequence
  Synthetic
uguugagagaagggagaggg

SEQ ID NO: 807360 - RNA, 20 nt, Artificial Sequence
  Synthetic
ugcuuaucuuugggagaggg

SEQ ID NO: 807361 - RNA, 20 nt, Artificial Sequence
  Synthetic
aguuaugcaccuugagaggg

SEQ ID NO: 807362 - RNA, 20 nt, Artificial Sequence
  Synthetic
cccuggggacuacuagaggg

SEQ ID NO: 807363 - RNA, 20 nt, Artificial Sequence
  Synthetic
agguggggauuccuagaggg

SEQ ID NO: 807364 - RNA, 20 nt, Artificial Sequence
  Synthetic
uguuucguucucaacgaggg

SEQ ID NO: 807365 - RNA, 20 nt, Artificial Sequence
  Synthetic
uagaaauaaagaagcgaggg

SEQ ID NO: 807366 - RNA, 20 nt, Artificial Sequence
  Synthetic
agagagugagggaaggaggg

SEQ ID NO: 807367 - RNA, 20 nt, Artificial Sequence
  Synthetic
aguagaugugggaaggaggg

SEQ ID NO: 807368 - RNA, 20 nt, Artificial Sequence
  Synthetic
ugaauggaaagggaggaggg

SEQ ID NO: 807369 - RNA, 20 nt, Artificial Sequence
  Synthetic
cuuugggaagcugaggaggg

SEQ ID NO: 807370 - RNA, 20 nt, Artificial Sequence
  Synthetic
aguggggaagaagcggaggg

SEQ ID NO: 807371 - RNA, 20 nt, Artificial Sequence
  Synthetic
aaaaaaggggaaagggaggg

SEQ ID NO: 807372 - RNA, 20 nt, Artificial Sequence
  Synthetic
agaaaggaaggaagggaggg

SEQ ID NO: 807373 - RNA, 20 nt, Artificial Sequence
  Synthetic
aaggcaauuuccagggaggg

SEQ ID NO: 807374 - RNA, 20 nt, Artificial Sequence
  Synthetic
aagaagaaagucagggaggg

SEQ ID NO: 807375 - RNA, 20 nt, Artificial Sequence
  Synthetic
aaaaaaagaaagagggaggg

SEQ ID NO: 807376 - RNA, 20 nt, Artificial Sequence
  Synthetic
aaggggaaagggagggaggg

SEQ ID NO: 807377 - RNA, 20 nt, Artificial Sequence
  Synthetic
aggaaggaagggagggaggg

SEQ ID NO: 807378 - RNA, 20 nt, Artificial Sequence
  Synthetic
agaaagucagggagggaggg

SEQ ID NO: 807379 - RNA, 20 nt, Artificial Sequence
  Synthetic
aggaagggagggagggaggg

SEQ ID NO: 807380 - RNA, 20 nt, Artificial Sequence
  Synthetic
agucagggagggagggaggg

SEQ ID NO: 807381 - RNA, 20 nt, Artificial Sequence
  Synthetic
aaggagggagggagggaggg

SEQ ID NO: 807382 - RNA, 20 nt, Artificial Sequence
  Synthetic
ccgaaaggaggaggggaggg

SEQ ID NO: 807383 - RNA, 20 nt, Artificial Sequence
  Synthetic
ucaaggacagacggggaggg

SEQ ID NO: 807384 - RNA, 20 nt, Artificial Sequence
  Synthetic
guugugggguggggggaggg

SEQ ID NO: 807385 - RNA, 20 nt, Artificial Sequence
  Synthetic
ugagagaaagugggggaggg

SEQ ID NO: 807386 - RNA, 20 nt, Artificial Sequence
  Synthetic
uuagaguacggcugggaggg

SEQ ID NO: 807387 - RNA, 20 nt, Artificial Sequence
  Synthetic
cauaagaucagaauggaggg

SEQ ID NO: 807388 - RNA, 20 nt, Artificial Sequence
  Synthetic
cacuggggccuacuggaggg

SEQ ID NO: 807389 - RNA, 20 nt, Artificial Sequence
  Synthetic
ucaguugccacccuggaggg

SEQ ID NO: 807390 - RNA, 20 nt, Artificial Sequence
  Synthetic
uauucauuaguucuggaggg

SEQ ID NO: 807391 - RNA, 20 nt, Artificial Sequence
  Synthetic
uaugugugugagguggaggg

SEQ ID NO: 807392 - RNA, 20 nt, Artificial Sequence
  Synthetic
aucuacucuaggguggaggg

SEQ ID NO: 807393 - RNA, 20 nt, Artificial Sequence
  Synthetic
cuaaucgcucuguuggaggg

SEQ ID NO: 807394 - RNA, 20 nt, Artificial Sequence
  Synthetic
uguucccuuucuuaugaggg

SEQ ID NO: 807395 - RNA, 20 nt, Artificial Sequence
  Synthetic
cuccacuacaguucugaggg

SEQ ID NO: 807396 - RNA, 20 nt, Artificial Sequence
  Synthetic
uuuuuuugcuucagugaggg

SEQ ID NO: 807397 - RNA, 20 nt, Artificial Sequence
  Synthetic
accaaacccacucgugaggg

SEQ ID NO: 807398 - RNA, 20 nt, Artificial Sequence
  Synthetic
uuugcaacuucucgugaggg

SEQ ID NO: 807399 - RNA, 20 nt, Artificial Sequence
  Synthetic
ugauagcuguuaugugaggg

SEQ ID NO: 807400 - RNA, 20 nt, Artificial Sequence
  Synthetic
cugcaaaagaccugugaggg

SEQ ID NO: 807401 - RNA, 20 nt, Artificial Sequence
  Synthetic
auaugcugggggugugaggg

SEQ ID NO: 807402 - RNA, 20 nt, Artificial Sequence
  Synthetic
caggcuuuuuggcuugaggg

SEQ ID NO: 807403 - RNA, 20 nt, Artificial Sequence
  Synthetic
aggcaauuggaucuugaggg

SEQ ID NO: 807404 - RNA, 20 nt, Artificial Sequence
  Synthetic
ucaacauaggaauuugaggg

SEQ ID NO: 807405 - RNA, 20 nt, Artificial Sequence
  Synthetic
uguugugucucagaauaggg

SEQ ID NO: 807406 - RNA, 20 nt, Artificial Sequence
  Synthetic
uugugucucagggaauaggg

SEQ ID NO: 807407 - RNA, 20 nt, Artificial Sequence
  Synthetic
uagcauuuucaaagauaggg

SEQ ID NO: 807408 - RNA, 20 nt, Artificial Sequence
  Synthetic
uuugauuuuuuuagauaggg

SEQ ID NO: 807409 - RNA, 20 nt, Artificial Sequence
  Synthetic
ugcaaggauaacauauaggg

SEQ ID NO: 807410 - RNA, 20 nt, Artificial Sequence
  Synthetic
ugaagacuugaaaacuaggg

SEQ ID NO: 807411 - RNA, 20 nt, Artificial Sequence
  Synthetic
agaggugguucagacuaggg

SEQ ID NO: 807412 - RNA, 20 nt, Artificial Sequence
  Synthetic
uaagagcuagaggacuaggg

SEQ ID NO: 807413 - RNA, 20 nt, Artificial Sequence
  Synthetic
acagucucacaugacuaggg

SEQ ID NO: 807414 - RNA, 20 nt, Artificial Sequence
  Synthetic
uauaaucccagcuacuaggg

SEQ ID NO: 807415 - RNA, 20 nt, Artificial Sequence
  Synthetic
uguaaucccagcuacuaggg

SEQ ID NO: 807416 - RNA, 20 nt, Artificial Sequence
  Synthetic
aguagucccagcuacuaggg

SEQ ID NO: 807417 - RNA, 20 nt, Artificial Sequence
  Synthetic
acaaggcucacaaccuaggg

SEQ ID NO: 807418 - RNA, 20 nt, Artificial Sequence
  Synthetic
uaaaaaugccuggccuaggg

SEQ ID NO: 807419 - RNA, 20 nt, Artificial Sequence
  Synthetic
uauguaacaaaugccuaggg

SEQ ID NO: 807420 - RNA, 20 nt, Artificial Sequence
  Synthetic
ucucuagggcaaaucuaggg

SEQ ID NO: 807421 - RNA, 20 nt, Artificial Sequence
  Synthetic
aaccaggaucuacucuaggg

SEQ ID NO: 807422 - RNA, 20 nt, Artificial Sequence
  Synthetic
uggugaguugagaaguaggg

SEQ ID NO: 807423 - RNA, 20 nt, Artificial Sequence
  Synthetic
uggagaauuauccaguaggg

SEQ ID NO: 807424 - RNA, 20 nt, Artificial Sequence
  Synthetic
cuacuucuuaaaugguaggg

SEQ ID NO: 807425 - RNA, 20 nt, Artificial Sequence
  Synthetic
ucaagcuauucaugguaggg

SEQ ID NO: 807426 - RNA, 20 nt, Artificial Sequence
  Synthetic
auugauaaauauuuguaggg

SEQ ID NO: 807427 - RNA, 20 nt, Artificial Sequence
  Synthetic
ccagcaucuugaaauuaggg

SEQ ID NO: 807428 - RNA, 20 nt, Artificial Sequence
  Synthetic
auggucauaaagaauuaggg

SEQ ID NO: 807429 - RNA, 20 nt, Artificial Sequence
  Synthetic
uaagaaagauaacauuaggg

SEQ ID NO: 807430 - RNA, 20 nt, Artificial Sequence
  Synthetic
auagaauggggcgauuaggg

SEQ ID NO: 807431 - RNA, 20 nt, Artificial Sequence
  Synthetic
aaacuaucagacuauuaggg

SEQ ID NO: 807432 - RNA, 20 nt, Artificial Sequence
  Synthetic
uguaaucccagcacuuaggg

SEQ ID NO: 807433 - RNA, 20 nt, Artificial Sequence
  Synthetic
uguaacccuagcgcuuaggg

SEQ ID NO: 807434 - RNA, 20 nt, Artificial Sequence
  Synthetic
ccacaacaucucucuuaggg

SEQ ID NO: 807435 - RNA, 20 nt, Artificial Sequence
  Synthetic
ccucauaaaaagaguuaggg

SEQ ID NO: 807436 - RNA, 20 nt, Artificial Sequence
  Synthetic
ccucauaaaaugaguuaggg

SEQ ID NO: 807437 - RNA, 20 nt, Artificial Sequence
  Synthetic
caggauuauuauaguuaggg

SEQ ID NO: 807438 - RNA, 20 nt, Artificial Sequence
  Synthetic
acaucaccaugaauuuaggg

SEQ ID NO: 807439 - RNA, 20 nt, Artificial Sequence
  Synthetic
cuucauagaaugauuuaggg

SEQ ID NO: 807440 - RNA, 20 nt, Artificial Sequence
  Synthetic
aggagauggggccuuuaggg

SEQ ID NO: 807441 - RNA, 20 nt, Artificial Sequence
  Synthetic
uauuaccaacaaaaaacggg

SEQ ID NO: 807442 - RNA, 20 nt, Artificial Sequence
  Synthetic
cucaaaagaagacaaacggg

SEQ ID NO: 807443 - RNA, 20 nt, Artificial Sequence
  Synthetic
uguagucccagcuacacggg

SEQ ID NO: 807444 - RNA, 20 nt, Artificial Sequence
  Synthetic
cuuugggaggccgagacggg

SEQ ID NO: 807445 - RNA, 20 nt, Artificial Sequence
  Synthetic
cuguaaucccagcuaccggg

SEQ ID NO: 807446 - RNA, 20 nt, Artificial Sequence
  Synthetic
augguguaaguaaacccggg

SEQ ID NO: 807447 - RNA, 20 nt, Artificial Sequence
  Synthetic
aagaauugcucgaacccggg

SEQ ID NO: 807448 - RNA, 20 nt, Artificial Sequence
  Synthetic
aagaaucacuugaacccggg

SEQ ID NO: 807449 - RNA, 20 nt, Artificial Sequence
  Synthetic
gagaaucgcuugaacccggg

SEQ ID NO: 807450 - RNA, 20 nt, Artificial Sequence
  Synthetic
aguagccucagcuacccggg

SEQ ID NO: 807451 - RNA, 20 nt, Artificial Sequence
  Synthetic
cuuuuaaaagagaugccggg

SEQ ID NO: 807452 - RNA, 20 nt, Artificial Sequence
  Synthetic
uauuugaaaaccauuccggg

SEQ ID NO: 807453 - RNA, 20 nt, Artificial Sequence
  Synthetic
cucugggaggccaaagcggg

SEQ ID NO: 807454 - RNA, 20 nt, Artificial Sequence
  Synthetic
cugcugcucaggccagcggg

SEQ ID NO: 807455 - RNA, 20 nt, Artificial Sequence
  Synthetic
uaauuuacuguuucagcggg

SEQ ID NO: 807456 - RNA, 20 nt, Artificial Sequence
  Synthetic
cuuagggaggccaaggcggg

SEQ ID NO: 807457 - RNA, 20 nt, Artificial Sequence
  Synthetic
cugugggaggccaaggcggg

SEQ ID NO: 807458 - RNA, 20 nt, Artificial Sequence
  Synthetic
cuuugggaggccaaggcggg

SEQ ID NO: 807459 - RNA, 20 nt, Artificial Sequence
  Synthetic
cuuugggaggcagaggcggg

SEQ ID NO: 807460 - RNA, 20 nt, Artificial Sequence
  Synthetic
cuuuggaaggccgaggcggg

SEQ ID NO: 807461 - RNA, 20 nt, Artificial Sequence
  Synthetic
cuucaggaggccgaggcggg

SEQ ID NO: 807462 - RNA, 20 nt, Artificial Sequence
  Synthetic
cuuggggaggccgaggcggg

SEQ ID NO: 807463 - RNA, 20 nt, Artificial Sequence
  Synthetic
uuuggggaggccgaggcggg

SEQ ID NO: 807464 - RNA, 20 nt, Artificial Sequence
  Synthetic
cucugggaggccgaggcggg

SEQ ID NO: 807465 - RNA, 20 nt, Artificial Sequence
  Synthetic
cuuugggaggccgaggcggg

SEQ ID NO: 807466 - RNA, 20 nt, Artificial Sequence
  Synthetic
uuuuaagaggaugaggcggg

SEQ ID NO: 807467 - RNA, 20 nt, Artificial Sequence
  Synthetic
cuuugggaggaugaggcggg

SEQ ID NO: 807468 - RNA, 20 nt, Artificial Sequence
  Synthetic
cuuugggagccugaggcggg

SEQ ID NO: 807469 - RNA, 20 nt, Artificial Sequence
  Synthetic
cuuugggaggcugaggcggg

SEQ ID NO: 807470 - RNA, 20 nt, Artificial Sequence
  Synthetic
uuuugggaggcugaggcggg

SEQ ID NO: 807471 - RNA, 20 nt, Artificial Sequence
  Synthetic
uuccauggaucaggggcggg

SEQ ID NO: 807472 - RNA, 20 nt, Artificial Sequence
  Synthetic
ucaccauucuacauggcggg

SEQ ID NO: 807473 - RNA, 20 nt, Artificial Sequence
  Synthetic
uggugguggggccuggcggg

SEQ ID NO: 807474 - RNA, 20 nt, Artificial Sequence
  Synthetic
cgcaggggccuguuggcggg

SEQ ID NO: 807475 - RNA, 20 nt, Artificial Sequence
  Synthetic
uguaaucccagccacucggg

SEQ ID NO: 807476 - RNA, 20 nt, Artificial Sequence
  Synthetic
ugagaaagacuucacucggg

SEQ ID NO: 807477 - RNA, 20 nt, Artificial Sequence
  Synthetic
uguaaucccaacuacucggg

SEQ ID NO: 807478 - RNA, 20 nt, Artificial Sequence
  Synthetic
uguaguaccagcuacucggg

SEQ ID NO: 807479 - RNA, 20 nt, Artificial Sequence
  Synthetic
ucuaaucccagcuacucggg

SEQ ID NO: 807480 - RNA, 20 nt, Artificial Sequence
  Synthetic
uguaaucccagcuacucggg

SEQ ID NO: 807481 - RNA, 20 nt, Artificial Sequence
  Synthetic
uauagucccagcuacucggg

SEQ ID NO: 807482 - RNA, 20 nt, Artificial Sequence
  Synthetic
uguagucccagcuacucggg

SEQ ID NO: 807483 - RNA, 20 nt, Artificial Sequence
  Synthetic
uguggucccagcuacucggg

SEQ ID NO: 807484 - RNA, 20 nt, Artificial Sequence
  Synthetic
uguaaucucagcuacucggg

SEQ ID NO: 807485 - RNA, 20 nt, Artificial Sequence
  Synthetic
uguaguuccugcuacucggg

SEQ ID NO: 807486 - RNA, 20 nt, Artificial Sequence
  Synthetic
uguaaucccaguuacucggg

SEQ ID NO: 807487 - RNA, 20 nt, Artificial Sequence
  Synthetic
uguaguccuagaugcucggg

SEQ ID NO: 807488 - RNA, 20 nt, Artificial Sequence
  Synthetic
ugugguaccagcugcucggg

SEQ ID NO: 807489 - RNA, 20 nt, Artificial Sequence
  Synthetic
uguagucccagcugcucggg

SEQ ID NO: 807490 - RNA, 20 nt, Artificial Sequence
  Synthetic
cuuugggaggcugagucggg

SEQ ID NO: 807491 - RNA, 20 nt, Artificial Sequence
  Synthetic
acacacugaggccugucggg

SEQ ID NO: 807492 - RNA, 20 nt, Artificial Sequence
  Synthetic
uguaaucccagcacuucggg

SEQ ID NO: 807493 - RNA, 20 nt, Artificial Sequence
  Synthetic
uuuuaaaagugguguucggg

SEQ ID NO: 807494 - RNA, 20 nt, Artificial Sequence
  Synthetic
uauuuuugauguauuucggg

SEQ ID NO: 807495 - RNA, 20 nt, Artificial Sequence
  Synthetic
aguuuucauugauuuucggg

SEQ ID NO: 807496 - RNA, 20 nt, Artificial Sequence
  Synthetic
ugaugaguaacucaaagggg

SEQ ID NO: 807497 - RNA, 20 nt, Artificial Sequence
  Synthetic
uacacuaaaaaagaaagggg

SEQ ID NO: 807498 - RNA, 20 nt, Artificial Sequence
  Synthetic
uagugguagggggaaagggg

SEQ ID NO: 807499 - RNA, 20 nt, Artificial Sequence
  Synthetic
auuauaugcuaaacaagggg

SEQ ID NO: 807500 - RNA, 20 nt, Artificial Sequence
  Synthetic
uaagcaguggugccaagggg

SEQ ID NO: 807501 - RNA, 20 nt, Artificial Sequence
  Synthetic
ucuugaccacucucaagggg

SEQ ID NO: 807502 - RNA, 20 nt, Artificial Sequence
  Synthetic
aaaugaguuaacagaagggg

SEQ ID NO: 807503 - RNA, 20 nt, Artificial Sequence
  Synthetic
aggggagggaagggaagggg

SEQ ID NO: 807504 - RNA, 20 nt, Artificial Sequence
  Synthetic
uagccaugaaagugaagggg

SEQ ID NO: 807505 - RNA, 20 nt, Artificial Sequence
  Synthetic
aggccugaaaggcuaagggg

SEQ ID NO: 807506 - RNA, 20 nt, Artificial Sequence
  Synthetic
auugugacaguauuaagggg

SEQ ID NO: 807507 - RNA, 20 nt, Artificial Sequence
  Synthetic
ugaccuuuuuauuuaagggg

SEQ ID NO: 807508 - RNA, 20 nt, Artificial Sequence
  Synthetic
acccugcaaacccacagggg

SEQ ID NO: 807509 - RNA, 20 nt, Artificial Sequence
  Synthetic
ugauaauccacucacagggg

SEQ ID NO: 807510 - RNA, 20 nt, Artificial Sequence
  Synthetic
agguaauugaauuacagggg

SEQ ID NO: 807511 - RNA, 20 nt, Artificial Sequence
  Synthetic
aauuuacauuuuagcagggg

SEQ ID NO: 807512 - RNA, 20 nt, Artificial Sequence
  Synthetic
acagggaguacaggcagggg

SEQ ID NO: 807513 - RNA, 20 nt, Artificial Sequence
  Synthetic
augggagagauaggcagggg

SEQ ID NO: 807514 - RNA, 20 nt, Artificial Sequence
  Synthetic
uaauagaaacauggcagggg

SEQ ID NO: 807515 - RNA, 20 nt, Artificial Sequence
  Synthetic
auuuuuccauggaucagggg

SEQ ID NO: 807516 - RNA, 20 nt, Artificial Sequence
  Synthetic
cuucaaagagcucucagggg

SEQ ID NO: 807517 - RNA, 20 nt, Artificial Sequence
  Synthetic
uauucaccaucagucagggg

SEQ ID NO: 807518 - RNA, 20 nt, Artificial Sequence
  Synthetic
cagaauauggauuucagggg

SEQ ID NO: 807519 - RNA, 20 nt, Artificial Sequence
  Synthetic
uuuaaaaaagaaaagagggg

SEQ ID NO: 807520 - RNA, 20 nt, Artificial Sequence
  Synthetic
agaguguuauuaaagagggg

SEQ ID NO: 807521 - RNA, 20 nt, Artificial Sequence
  Synthetic
ucuaaugugugagagagggg

SEQ ID NO: 807522 - RNA, 20 nt, Artificial Sequence
  Synthetic
agggaagggaaggagagggg

SEQ ID NO: 807523 - RNA, 20 nt, Artificial Sequence
  Synthetic
ucgggggguggggcgagggg

SEQ ID NO: 807524 - RNA, 20 nt, Artificial Sequence
  Synthetic
caccggggccugucgagggg

SEQ ID NO: 807525 - RNA, 20 nt, Artificial Sequence
  Synthetic
aauccaauguaaaggagggg

SEQ ID NO: 807526 - RNA, 20 nt, Artificial Sequence
  Synthetic
cacuccgaaaggaggagggg

SEQ ID NO: 807527 - RNA, 20 nt, Artificial Sequence
  Synthetic
agggaagggaaggggagggg

SEQ ID NO: 807528 - RNA, 20 nt, Artificial Sequence
  Synthetic
agggaaggggaggggagggg

SEQ ID NO: 807529 - RNA, 20 nt, Artificial Sequence
  Synthetic
aggggaggggaggggagggg

SEQ ID NO: 807530 - RNA, 20 nt, Artificial Sequence
  Synthetic
uugugggguggggggagggg

SEQ ID NO: 807531 - RNA, 20 nt, Artificial Sequence
  Synthetic
aaaaaauuaacugggagggg

SEQ ID NO: 807532 - RNA, 20 nt, Artificial Sequence
  Synthetic
auaagaucagaauggagggg

SEQ ID NO: 807533 - RNA, 20 nt, Artificial Sequence
  Synthetic
uggagaguagauuggagggg

SEQ ID NO: 807534 - RNA, 20 nt, Artificial Sequence
  Synthetic
uaggcccaagggaugagggg

SEQ ID NO: 807535 - RNA, 20 nt, Artificial Sequence
  Synthetic
ugcagagccaugaugagggg

SEQ ID NO: 807536 - RNA, 20 nt, Artificial Sequence
  Synthetic
ucuccuauauuucugagggg

SEQ ID NO: 807537 - RNA, 20 nt, Artificial Sequence
  Synthetic
aguacagaaccauugagggg

SEQ ID NO: 807538 - RNA, 20 nt, Artificial Sequence
  Synthetic
acagaaauggcuuugagggg

SEQ ID NO: 807539 - RNA, 20 nt, Artificial Sequence
  Synthetic
augguagccugaaauagggg

SEQ ID NO: 807540 - RNA, 20 nt, Artificial Sequence
  Synthetic
uucagaaaguuuuauagggg

SEQ ID NO: 807541 - RNA, 20 nt, Artificial Sequence
  Synthetic
aggggguggggggcuagggg

SEQ ID NO: 807542 - RNA, 20 nt, Artificial Sequence
  Synthetic
cggcuucuguuggcuagggg

SEQ ID NO: 807543 - RNA, 20 nt, Artificial Sequence
  Synthetic
caaauaacuggcucuagggg

SEQ ID NO: 807544 - RNA, 20 nt, Artificial Sequence
  Synthetic
uucacugcugggaguagggg

SEQ ID NO: 807545 - RNA, 20 nt, Artificial Sequence
  Synthetic
uuucaucacacauguagggg

SEQ ID NO: 807546 - RNA, 20 nt, Artificial Sequence
  Synthetic
cccucuaagggauguagggg

SEQ ID NO: 807547 - RNA, 20 nt, Artificial Sequence
  Synthetic
uucauggaggggcuuagggg

SEQ ID NO: 807548 - RNA, 20 nt, Artificial Sequence
  Synthetic
uacaaggaacuucuuagggg

SEQ ID NO: 807549 - RNA, 20 nt, Artificial Sequence
  Synthetic
augagagcaggcguuagggg

SEQ ID NO: 807550 - RNA, 20 nt, Artificial Sequence
  Synthetic
aggggaugggggguuagggg

SEQ ID NO: 807551 - RNA, 20 nt, Artificial Sequence
  Synthetic
agaggcuguggauuuagggg

SEQ ID NO: 807552 - RNA, 20 nt, Artificial Sequence
  Synthetic
uguuuugagcuauuuagggg

SEQ ID NO: 807553 - RNA, 20 nt, Artificial Sequence
  Synthetic
aaaggaauuuuauuuagggg

SEQ ID NO: 807554 - RNA, 20 nt, Artificial Sequence
  Synthetic
ucagcucucaguuuuagggg

SEQ ID NO: 807555 - RNA, 20 nt, Artificial Sequence
  Synthetic
ugaaaaagcaaaaaacgggg

SEQ ID NO: 807556 - RNA, 20 nt, Artificial Sequence
  Synthetic
ucuuucucuguugcccgggg

SEQ ID NO: 807557 - RNA, 20 nt, Artificial Sequence
  Synthetic
agcguuuugggaggccgggg

SEQ ID NO: 807558 - RNA, 20 nt, Artificial Sequence
  Synthetic
acaaauuuuagccggcgggg

SEQ ID NO: 807559 - RNA, 20 nt, Artificial Sequence
  Synthetic
caccauucuacauggcgggg

SEQ ID NO: 807560 - RNA, 20 nt, Artificial Sequence
  Synthetic
uggggacuacuagaaggggg

SEQ ID NO: 807561 - RNA, 20 nt, Artificial Sequence
  Synthetic
ccagagcagaagccaggggg

SEQ ID NO: 807562 - RNA, 20 nt, Artificial Sequence
  Synthetic
uacuucacagagccaggggg

SEQ ID NO: 807563 - RNA, 20 nt, Artificial Sequence
  Synthetic
cacuggggccugucaggggg

SEQ ID NO: 807564 - RNA, 20 nt, Artificial Sequence
  Synthetic
aaagagugagacagaggggg

SEQ ID NO: 807565 - RNA, 20 nt, Artificial Sequence
  Synthetic
aagauuaaugcuggaggggg

SEQ ID NO: 807566 - RNA, 20 nt, Artificial Sequence
  Synthetic
uaguggggggguugaggggg

SEQ ID NO: 807567 - RNA, 20 nt, Artificial Sequence
  Synthetic
aaaaucacuggucuaggggg

SEQ ID NO: 807568 - RNA, 20 nt, Artificial Sequence
  Synthetic
uguagucccagcuacggggg

SEQ ID NO: 807569 - RNA, 20 nt, Artificial Sequence
  Synthetic
accauucuacauggcggggg

SEQ ID NO: 807570 - RNA, 20 nt, Artificial Sequence
  Synthetic
ccugguugggguggcggggg

SEQ ID NO: 807571 - RNA, 20 nt, Artificial Sequence
  Synthetic
auggacaucuuuggcggggg

SEQ ID NO: 807572 - RNA, 20 nt, Artificial Sequence
  Synthetic
ccauucuacauggcgggggg

SEQ ID NO: 807573 - RNA, 20 nt, Artificial Sequence
  Synthetic
cacugaggccugucgggggg

SEQ ID NO: 807574 - RNA, 20 nt, Artificial Sequence
  Synthetic
ugggguggggggaggggggg

SEQ ID NO: 807575 - RNA, 20 nt, Artificial Sequence
  Synthetic
cuccuuguuggggggggggg

SEQ ID NO: 807576 - RNA, 20 nt, Artificial Sequence
  Synthetic
ccuccuuguugggggggggg

SEQ ID NO: 807577 - RNA, 20 nt, Artificial Sequence
  Synthetic
uguguguguguugggggggg

SEQ ID NO: 807578 - RNA, 20 nt, Artificial Sequence
  Synthetic
uuguguguguguuggggggg

SEQ ID NO: 807579 - RNA, 20 nt, Artificial Sequence
  Synthetic
uggccuccuuguuggggggg

SEQ ID NO: 807580 - RNA, 20 nt, Artificial Sequence
  Synthetic
augguucucaaaaugggggg

SEQ ID NO: 807581 - RNA, 20 nt, Artificial Sequence
  Synthetic
uauuccacagaccugggggg

SEQ ID NO: 807582 - RNA, 20 nt, Artificial Sequence
  Synthetic
aacuguuguggggugggggg

SEQ ID NO: 807583 - RNA, 20 nt, Artificial Sequence
  Synthetic
acaguggugggguugggggg

SEQ ID NO: 807584 - RNA, 20 nt, Artificial Sequence
  Synthetic
auuguguguguguugggggg

SEQ ID NO: 807585 - RNA, 20 nt, Artificial Sequence
  Synthetic
auggccuccuuguugggggg

SEQ ID NO: 807586 - RNA, 20 nt, Artificial Sequence
  Synthetic
uuucuuucuuuuuugggggg

SEQ ID NO: 807587 - RNA, 20 nt, Artificial Sequence
  Synthetic
uaucugcaagccaauggggg

SEQ ID NO: 807588 - RNA, 20 nt, Artificial Sequence
  Synthetic
agguaacugaaucauggggg

SEQ ID NO: 807589 - RNA, 20 nt, Artificial Sequence
  Synthetic
aggugauuggaucauggggg

SEQ ID NO: 807590 - RNA, 20 nt, Artificial Sequence
  Synthetic
agaacacauggagauggggg

SEQ ID NO: 807591 - RNA, 20 nt, Artificial Sequence
  Synthetic
aguauguguguagauggggg

SEQ ID NO: 807592 - RNA, 20 nt, Artificial Sequence
  Synthetic
agauuaacuugauauggggg

SEQ ID NO: 807593 - RNA, 20 nt, Artificial Sequence
  Synthetic
ugguuauuagauccuggggg

SEQ ID NO: 807594 - RNA, 20 nt, Artificial Sequence
  Synthetic
ucagugagagaaaguggggg

SEQ ID NO: 807595 - RNA, 20 nt, Artificial Sequence
  Synthetic
uugggaggccgagguggggg

SEQ ID NO: 807596 - RNA, 20 nt, Artificial Sequence
  Synthetic
ugcacugcuugagguggggg

SEQ ID NO: 807597 - RNA, 20 nt, Artificial Sequence
  Synthetic
agauuggggguugguggggg

SEQ ID NO: 807598 - RNA, 20 nt, Artificial Sequence
  Synthetic
aaauuagccagguguggggg

SEQ ID NO: 807599 - RNA, 20 nt, Artificial Sequence
  Synthetic
uguguguguguguguggggg

SEQ ID NO: 807600 - RNA, 20 nt, Artificial Sequence
  Synthetic
agaaaaaaaaaaauuggggg

SEQ ID NO: 807601 - RNA, 20 nt, Artificial Sequence
  Synthetic
cuugguugucacauuggggg

SEQ ID NO: 807602 - RNA, 20 nt, Artificial Sequence
  Synthetic
uggcugggcuccguuggggg

SEQ ID NO: 807603 - RNA, 20 nt, Artificial Sequence
  Synthetic
auaugcugggggguuggggg

SEQ ID NO: 807604 - RNA, 20 nt, Artificial Sequence
  Synthetic
cacaguggugggguuggggg

SEQ ID NO: 807605 - RNA, 20 nt, Artificial Sequence
  Synthetic
uuaaaaccagauguuggggg

SEQ ID NO: 807606 - RNA, 20 nt, Artificial Sequence
  Synthetic
acacuggugccuguuggggg

SEQ ID NO: 807607 - RNA, 20 nt, Artificial Sequence
  Synthetic
uauuguguguguguuggggg

SEQ ID NO: 807608 - RNA, 20 nt, Artificial Sequence
  Synthetic
uauggccuccuuguuggggg

SEQ ID NO: 807609 - RNA, 20 nt, Artificial Sequence
  Synthetic
ugguauuacuaauuuggggg

SEQ ID NO: 807610 - RNA, 20 nt, Artificial Sequence
  Synthetic
cuguuuuuguuuuuuggggg

SEQ ID NO: 807611 - RNA, 20 nt, Artificial Sequence
  Synthetic
auguaaagcagagaaugggg

SEQ ID NO: 807612 - RNA, 20 nt, Artificial Sequence
  Synthetic
agaaauaucagagaaugggg

SEQ ID NO: 807613 - RNA, 20 nt, Artificial Sequence
  Synthetic
uguuggcuguaauaaugggg

SEQ ID NO: 807614 - RNA, 20 nt, Artificial Sequence
  Synthetic
aauuauaaauuauaaugggg

SEQ ID NO: 807615 - RNA, 20 nt, Artificial Sequence
  Synthetic
uacaaguuugggccaugggg

SEQ ID NO: 807616 - RNA, 20 nt, Artificial Sequence
  Synthetic
uacacagaaagaagaugggg

SEQ ID NO: 807617 - RNA, 20 nt, Artificial Sequence
  Synthetic
uucuuuuauugaagaugggg

SEQ ID NO: 807618 - RNA, 20 nt, Artificial Sequence
  Synthetic
aaaaaauuucacagaugggg

SEQ ID NO: 807619 - RNA, 20 nt, Artificial Sequence
  Synthetic
agagaagauuagagaugggg

SEQ ID NO: 807620 - RNA, 20 nt, Artificial Sequence
  Synthetic
cauuugagcccacgaugggg

SEQ ID NO: 807621 - RNA, 20 nt, Artificial Sequence
  Synthetic
uuuauaggcacaggaugggg

SEQ ID NO: 807622 - RNA, 20 nt, Artificial Sequence
  Synthetic
aacccuaugcagauaugggg

SEQ ID NO: 807623 - RNA, 20 nt, Artificial Sequence
  Synthetic
aagggacauauucuaugggg

SEQ ID NO: 807624 - RNA, 20 nt, Artificial Sequence
  Synthetic
aaggauaaguaaguaugggg

SEQ ID NO: 807625 - RNA, 20 nt, Artificial Sequence
  Synthetic
cugaugaaugggguaugggg

SEQ ID NO: 807626 - RNA, 20 nt, Artificial Sequence
  Synthetic
cgggacuguuuaaacugggg

SEQ ID NO: 807627 - RNA, 20 nt, Artificial Sequence
  Synthetic
ccagagugaaaacacugggg

SEQ ID NO: 807628 - RNA, 20 nt, Artificial Sequence
  Synthetic
cuggauaguccucacugggg

SEQ ID NO: 807629 - RNA, 20 nt, Artificial Sequence
  Synthetic
auaguuccacaugacugggg

SEQ ID NO: 807630 - RNA, 20 nt, Artificial Sequence
  Synthetic
ugaugcugauguuacugggg

SEQ ID NO: 807631 - RNA, 20 nt, Artificial Sequence
  Synthetic
cauuugcuuggcuccugggg

SEQ ID NO: 807632 - RNA, 20 nt, Artificial Sequence
  Synthetic
acaguuccacacagcugggg

SEQ ID NO: 807633 - RNA, 20 nt, Artificial Sequence
  Synthetic
aagaaccgcuugagcugggg

SEQ ID NO: 807634 - RNA, 20 nt, Artificial Sequence
  Synthetic
acagcauuuaguagcugggg

SEQ ID NO: 807635 - RNA, 20 nt, Artificial Sequence
  Synthetic
cgugggguggggggcugggg

SEQ ID NO: 807636 - RNA, 20 nt, Artificial Sequence
  Synthetic
acaguuccacauggcugggg

SEQ ID NO: 807637 - RNA, 20 nt, Artificial Sequence
  Synthetic
acaguucagcauggcugggg

SEQ ID NO: 807638 - RNA, 20 nt, Artificial Sequence
  Synthetic
accauucugcauggcugggg

SEQ ID NO: 807639 - RNA, 20 nt, Artificial Sequence
  Synthetic
acugguuugcauggcugggg

SEQ ID NO: 807640 - RNA, 20 nt, Artificial Sequence
  Synthetic
acaguucaauauggcugggg

SEQ ID NO: 807641 - RNA, 20 nt, Artificial Sequence
  Synthetic
acaguucuguguggcugggg

SEQ ID NO: 807642 - RNA, 20 nt, Artificial Sequence
  Synthetic
cuaauuggggaggucugggg

SEQ ID NO: 807643 - RNA, 20 nt, Artificial Sequence
  Synthetic
ccugguuauuuggucugggg

SEQ ID NO: 807644 - RNA, 20 nt, Artificial Sequence
  Synthetic
aaaagaaagaaugucugggg

SEQ ID NO: 807645 - RNA, 20 nt, Artificial Sequence
  Synthetic
caucuacucagcuucugggg

SEQ ID NO: 807646 - RNA, 20 nt, Artificial Sequence
  Synthetic
agcaacaucuguuucugggg

SEQ ID NO: 807647 - RNA, 20 nt, Artificial Sequence
  Synthetic
uagaccuguuaacagugggg

SEQ ID NO: 807648 - RNA, 20 nt, Artificial Sequence
  Synthetic
aacucucccaaggagugggg

SEQ ID NO: 807649 - RNA, 20 nt, Artificial Sequence
  Synthetic
aaaaguagccaaucgugggg

SEQ ID NO: 807650 - RNA, 20 nt, Artificial Sequence
  Synthetic
caccagggccugucgugggg

SEQ ID NO: 807651 - RNA, 20 nt, Artificial Sequence
  Synthetic
cacuggggccugucgugggg

SEQ ID NO: 807652 - RNA, 20 nt, Artificial Sequence
  Synthetic
acaacccagaccaggugggg

SEQ ID NO: 807653 - RNA, 20 nt, Artificial Sequence
  Synthetic
auucucacucauaggugggg

SEQ ID NO: 807654 - RNA, 20 nt, Artificial Sequence
  Synthetic
aggcacaggauggggugggg

SEQ ID NO: 807655 - RNA, 20 nt, Artificial Sequence
  Synthetic
aauuuucagcuugggugggg

SEQ ID NO: 807656 - RNA, 20 nt, Artificial Sequence
  Synthetic
uccuuuguuguugggugggg

SEQ ID NO: 807657 - RNA, 20 nt, Artificial Sequence
  Synthetic
cucuggggacuguggugggg

SEQ ID NO: 807658 - RNA, 20 nt, Artificial Sequence
  Synthetic
aagauuggggguuggugggg

SEQ ID NO: 807659 - RNA, 20 nt, Artificial Sequence
  Synthetic
cucuggggacugcugugggg

SEQ ID NO: 807660 - RNA, 20 nt, Artificial Sequence
  Synthetic
cacuggggccugcugugggg

SEQ ID NO: 807661 - RNA, 20 nt, Artificial Sequence
  Synthetic
auccugaaagcagugugggg

SEQ ID NO: 807662 - RNA, 20 nt, Artificial Sequence
  Synthetic
aggaggucccuagugugggg

SEQ ID NO: 807663 - RNA, 20 nt, Artificial Sequence
  Synthetic
uacucaagcuuagugugggg

SEQ ID NO: 807664 - RNA, 20 nt, Artificial Sequence
  Synthetic
uuuaagaugagauugugggg

SEQ ID NO: 807665 - RNA, 20 nt, Artificial Sequence
  Synthetic
cccugggaacuguugugggg

SEQ ID NO: 807666 - RNA, 20 nt, Artificial Sequence
  Synthetic
cucuggggacuguugugggg

SEQ ID NO: 807667 - RNA, 20 nt, Artificial Sequence
  Synthetic
caccggggccuguugugggg

SEQ ID NO: 807668 - RNA, 20 nt, Artificial Sequence
  Synthetic
ugugcuugugcuuugugggg

SEQ ID NO: 807669 - RNA, 20 nt, Artificial Sequence
  Synthetic
uugaaauaugugcauugggg

SEQ ID NO: 807670 - RNA, 20 nt, Artificial Sequence
  Synthetic
aguggguaucaggauugggg

SEQ ID NO: 807671 - RNA, 20 nt, Artificial Sequence
  Synthetic
uguaaucccagcacuugggg

SEQ ID NO: 807672 - RNA, 20 nt, Artificial Sequence
  Synthetic
cugauuuaguaggcuugggg

SEQ ID NO: 807673 - RNA, 20 nt, Artificial Sequence
  Synthetic
agucaaaaagaaaguugggg

SEQ ID NO: 807674 - RNA, 20 nt, Artificial Sequence
  Synthetic
aacuuucaaugcaguugggg

SEQ ID NO: 807675 - RNA, 20 nt, Artificial Sequence
  Synthetic
acacaguggugggguugggg

SEQ ID NO: 807676 - RNA, 20 nt, Artificial Sequence
  Synthetic
agggugagguaugguugggg

SEQ ID NO: 807677 - RNA, 20 nt, Artificial Sequence
  Synthetic
ccugacauuccugguugggg

SEQ ID NO: 807678 - RNA, 20 nt, Artificial Sequence
  Synthetic
cuauuguguguguguugggg

SEQ ID NO: 807679 - RNA, 20 nt, Artificial Sequence
  Synthetic
auauggccuccuuguugggg

SEQ ID NO: 807680 - RNA, 20 nt, Artificial Sequence
  Synthetic
uauauucuguugauuugggg

SEQ ID NO: 807681 - RNA, 20 nt, Artificial Sequence
  Synthetic
cauuauccaucccuuugggg

SEQ ID NO: 807682 - RNA, 20 nt, Artificial Sequence
  Synthetic
auuuaagauuuucuuugggg

SEQ ID NO: 807683 - RNA, 20 nt, Artificial Sequence
  Synthetic
uagaagguggggguuugggg

SEQ ID NO: 807684 - RNA, 20 nt, Artificial Sequence
  Synthetic
cugauuuaacugguuugggg

SEQ ID NO: 807685 - RNA, 20 nt, Artificial Sequence
  Synthetic
uuaaaucucuccuuuugggg

SEQ ID NO: 807686 - RNA, 20 nt, Artificial Sequence
  Synthetic
uagauuucuguguuuugggg

SEQ ID NO: 807687 - RNA, 20 nt, Artificial Sequence
  Synthetic
ugagcuacauauuuuugggg

SEQ ID NO: 807688 - RNA, 20 nt, Artificial Sequence
  Synthetic
aaagggcagcacaaaauggg

SEQ ID NO: 807689 - RNA, 20 nt, Artificial Sequence
  Synthetic
acaagggaguccaaaauggg

SEQ ID NO: 807690 - RNA, 20 nt, Artificial Sequence
  Synthetic
agagugugggagaaaauggg

SEQ ID NO: 807691 - RNA, 20 nt, Artificial Sequence
  Synthetic
caggcagacagagaaauggg

SEQ ID NO: 807692 - RNA, 20 nt, Artificial Sequence
  Synthetic
cuuugagaggccgaaauggg

SEQ ID NO: 807693 - RNA, 20 nt, Artificial Sequence
  Synthetic
caacauguugcauaaauggg

SEQ ID NO: 807694 - RNA, 20 nt, Artificial Sequence
  Synthetic
uacuuccaggauacaauggg

SEQ ID NO: 807695 - RNA, 20 nt, Artificial Sequence
  Synthetic
acccaaccccagccaauggg

SEQ ID NO: 807696 - RNA, 20 nt, Artificial Sequence
  Synthetic
aagacaauuuuuauaauggg

SEQ ID NO: 807697 - RNA, 20 nt, Artificial Sequence
  Synthetic
auuuucagucagcuaauggg

SEQ ID NO: 807698 - RNA, 20 nt, Artificial Sequence
  Synthetic
cauucuuccauucuaauggg

SEQ ID NO: 807699 - RNA, 20 nt, Artificial Sequence
  Synthetic
acgaaaagcuugaacauggg

SEQ ID NO: 807700 - RNA, 20 nt, Artificial Sequence
  Synthetic
ucagauucauaaaccauggg

SEQ ID NO: 807701 - RNA, 20 nt, Artificial Sequence
  Synthetic
uagaugagaaaccccauggg

SEQ ID NO: 807702 - RNA, 20 nt, Artificial Sequence
  Synthetic
ccacugcgcccggccauggg

SEQ ID NO: 807703 - RNA, 20 nt, Artificial Sequence
  Synthetic
uaucacgacaacagcauggg

SEQ ID NO: 807704 - RNA, 20 nt, Artificial Sequence
  Synthetic
agcccugccagcugcauggg

SEQ ID NO: 807705 - RNA, 20 nt, Artificial Sequence
  Synthetic
cccuaauuagcaaucauggg

SEQ ID NO: 807706 - RNA, 20 nt, Artificial Sequence
  Synthetic
uagcagcaaaggcucauggg

SEQ ID NO: 807707 - RNA, 20 nt, Artificial Sequence
  Synthetic
uaauccccagaugucauggg

SEQ ID NO: 807708 - RNA, 20 nt, Artificial Sequence
  Synthetic
aaauccccaggugucauggg

SEQ ID NO: 807709 - RNA, 20 nt, Artificial Sequence
  Synthetic
auugauuuuuuaaagauggg

SEQ ID NO: 807710 - RNA, 20 nt, Artificial Sequence
  Synthetic
ugguugaaauugcagauggg

SEQ ID NO: 807711 - RNA, 20 nt, Artificial Sequence
  Synthetic
cuuugggaggccgagauggg

SEQ ID NO: 807712 - RNA, 20 nt, Artificial Sequence
  Synthetic
agcuauucuggggagauggg

SEQ ID NO: 807713 - RNA, 20 nt, Artificial Sequence
  Synthetic
cuuaauaacuuuuagauggg

SEQ ID NO: 807714 - RNA, 20 nt, Artificial Sequence
  Synthetic
aggguguagaaauggauggg

SEQ ID NO: 807715 - RNA, 20 nt, Artificial Sequence
  Synthetic
ccuauuauguggaugauggg

SEQ ID NO: 807716 - RNA, 20 nt, Artificial Sequence
  Synthetic
aggaaccuaugagugauggg

SEQ ID NO: 807717 - RNA, 20 nt, Artificial Sequence
  Synthetic
accucugggucugugauggg

SEQ ID NO: 807718 - RNA, 20 nt, Artificial Sequence
  Synthetic
aaaaguaaugaaaauauggg

SEQ ID NO: 807719 - RNA, 20 nt, Artificial Sequence
  Synthetic
cauaaauuaaaagauauggg

SEQ ID NO: 807720 - RNA, 20 nt, Artificial Sequence
  Synthetic
agguaggagggugauauggg

SEQ ID NO: 807721 - RNA, 20 nt, Artificial Sequence
  Synthetic
aauuuaacuacuuauauggg

SEQ ID NO: 807722 - RNA, 20 nt, Artificial Sequence
  Synthetic
uguaaucccagcacuauggg

SEQ ID NO: 807723 - RNA, 20 nt, Artificial Sequence
  Synthetic
uguauuuaugaaaguauggg

SEQ ID NO: 807724 - RNA, 20 nt, Artificial Sequence
  Synthetic
uuuuauuucagagguauggg

SEQ ID NO: 807725 - RNA, 20 nt, Artificial Sequence
  Synthetic
acaaaguguguguguauggg

SEQ ID NO: 807726 - RNA, 20 nt, Artificial Sequence
  Synthetic
aauauaccaaaacuuauggg

SEQ ID NO: 807727 - RNA, 20 nt, Artificial Sequence
  Synthetic
aggaauuucuaauuuauggg

SEQ ID NO: 807728 - RNA, 20 nt, Artificial Sequence
  Synthetic
auacuuugcgaagaacuggg

SEQ ID NO: 807729 - RNA, 20 nt, Artificial Sequence
  Synthetic
aauacaaaaaauuaacuggg

SEQ ID NO: 807730 - RNA, 20 nt, Artificial Sequence
  Synthetic
cuaguaaucccaacacuggg

SEQ ID NO: 807731 - RNA, 20 nt, Artificial Sequence
  Synthetic
caagguaaacacccacuggg

SEQ ID NO: 807732 - RNA, 20 nt, Artificial Sequence
  Synthetic
uuuuggaccuauucacuggg

SEQ ID NO: 807733 - RNA, 20 nt, Artificial Sequence
  Synthetic
aaauaaugccauagacuggg

SEQ ID NO: 807734 - RNA, 20 nt, Artificial Sequence
  Synthetic
ugaaaguugaaaggacuggg

SEQ ID NO: 807735 - RNA, 20 nt, Artificial Sequence
  Synthetic
uggauuuaguagauacuggg

SEQ ID NO: 807736 - RNA, 20 nt, Artificial Sequence
  Synthetic
gagaaucgcuugaaccuggg

SEQ ID NO: 807737 - RNA, 20 nt, Artificial Sequence
  Synthetic
cagaauugcuugaaccuggg

SEQ ID NO: 807738 - RNA, 20 nt, Artificial Sequence
  Synthetic
cauuauuccacagaccuggg

SEQ ID NO: 807739 - RNA, 20 nt, Artificial Sequence
  Synthetic
uguagucccagcuaccuggg

SEQ ID NO: 807740 - RNA, 20 nt, Artificial Sequence
  Synthetic
uaccaugcucgcuaccuggg

SEQ ID NO: 807741 - RNA, 20 nt, Artificial Sequence
  Synthetic
acugauuccacagcccuggg

SEQ ID NO: 807742 - RNA, 20 nt, Artificial Sequence
  Synthetic
aggaauuagcuagcccuggg

SEQ ID NO: 807743 - RNA, 20 nt, Artificial Sequence
  Synthetic
ccacugcacucuagccuggg

SEQ ID NO: 807744 - RNA, 20 nt, Artificial Sequence
  Synthetic
agaagaaacaccggccuggg

SEQ ID NO: 807745 - RNA, 20 nt, Artificial Sequence
  Synthetic
uuuuaagaaaaaugccuggg

SEQ ID NO: 807746 - RNA, 20 nt, Artificial Sequence
  Synthetic
cuuccuagaaucauccuggg

SEQ ID NO: 807747 - RNA, 20 nt, Artificial Sequence
  Synthetic
uaacccccacacguccuggg

SEQ ID NO: 807748 - RNA, 20 nt, Artificial Sequence
  Synthetic
acaaauuaccacaagcuggg

SEQ ID NO: 807749 - RNA, 20 nt, Artificial Sequence
  Synthetic
uagccaugauagcagcuggg

SEQ ID NO: 807750 - RNA, 20 nt, Artificial Sequence
  Synthetic
uuguuuagaguacggcuggg

SEQ ID NO: 807751 - RNA, 20 nt, Artificial Sequence
  Synthetic
uuaaacacagcagugcuggg

SEQ ID NO: 807752 - RNA, 20 nt, Artificial Sequence
  Synthetic
ugccugcccaccuugcuggg

SEQ ID NO: 807753 - RNA, 20 nt, Artificial Sequence
  Synthetic
auucauuuuggguugcuggg

SEQ ID NO: 807754 - RNA, 20 nt, Artificial Sequence
  Synthetic
caaagagaaaaaaaucuggg

SEQ ID NO: 807755 - RNA, 20 nt, Artificial Sequence
  Synthetic
uauuuagaaaaaaaucuggg

SEQ ID NO: 807756 - RNA, 20 nt, Artificial Sequence
  Synthetic
agcacacacaaaaaucuggg

SEQ ID NO: 807757 - RNA, 20 nt, Artificial Sequence
  Synthetic
aaggaaugucaaaaucuggg

SEQ ID NO: 807758 - RNA, 20 nt, Artificial Sequence
  Synthetic
uaaaugaauuaaaaucuggg

SEQ ID NO: 807759 - RNA, 20 nt, Artificial Sequence
  Synthetic
ccacuucacucaacucuggg

SEQ ID NO: 807760 - RNA, 20 nt, Artificial Sequence
  Synthetic
uguaaucccagcacucuggg

SEQ ID NO: 807761 - RNA, 20 nt, Artificial Sequence
  Synthetic
auaaucacaucagcucuggg

SEQ ID NO: 807762 - RNA, 20 nt, Artificial Sequence
  Synthetic
ugguuacuuuuggcucuggg

SEQ ID NO: 807763 - RNA, 20 nt, Artificial Sequence
  Synthetic
uguaaucccaggucucuggg

SEQ ID NO: 807764 - RNA, 20 nt, Artificial Sequence
  Synthetic
augaaaacagggagucuggg

SEQ ID NO: 807765 - RNA, 20 nt, Artificial Sequence
  Synthetic
aacagagauuugggucuggg

SEQ ID NO: 807766 - RNA, 20 nt, Artificial Sequence
  Synthetic
cccuugcucuuuauucuggg

SEQ ID NO: 807767 - RNA, 20 nt, Artificial Sequence
  Synthetic
ugugacuccaacuuucuggg

SEQ ID NO: 807768 - RNA, 20 nt, Artificial Sequence
  Synthetic
cuuugggaggcagaaguggg

SEQ ID NO: 807769 - RNA, 20 nt, Artificial Sequence
  Synthetic
cuuugggaggccgaaguggg

SEQ ID NO: 807770 - RNA, 20 nt, Artificial Sequence
  Synthetic
cuuugggaggcugaaguggg

SEQ ID NO: 807771 - RNA, 20 nt, Artificial Sequence
  Synthetic
cuuuucuuauaauaaguggg

SEQ ID NO: 807772 - RNA, 20 nt, Artificial Sequence
  Synthetic
aaacgauuuaaaacaguggg

SEQ ID NO: 807773 - RNA, 20 nt, Artificial Sequence
  Synthetic
caacaggaacacacaguggg

SEQ ID NO: 807774 - RNA, 20 nt, Artificial Sequence
  Synthetic
cuccuuguccccacaguggg

SEQ ID NO: 807775 - RNA, 20 nt, Artificial Sequence
  Synthetic
uaugggagggacccaguggg

SEQ ID NO: 807776 - RNA, 20 nt, Artificial Sequence
  Synthetic
caugggagggauccaguggg

SEQ ID NO: 807777 - RNA, 20 nt, Artificial Sequence
  Synthetic
ugugggagggauccaguggg

SEQ ID NO: 807778 - RNA, 20 nt, Artificial Sequence
  Synthetic
aggagcgugugagcaguggg

SEQ ID NO: 807779 - RNA, 20 nt, Artificial Sequence
  Synthetic
acgugaguguguggaguggg

SEQ ID NO: 807780 - RNA, 20 nt, Artificial Sequence
  Synthetic
cuccuuuuauuuggaguggg

SEQ ID NO: 807781 - RNA, 20 nt, Artificial Sequence
  Synthetic
uaguugaagaggugaguggg

SEQ ID NO: 807782 - RNA, 20 nt, Artificial Sequence
  Synthetic
auuuaaauuuagcuaguggg

SEQ ID NO: 807783 - RNA, 20 nt, Artificial Sequence
  Synthetic
aggcugugaaggguaguggg

SEQ ID NO: 807784 - RNA, 20 nt, Artificial Sequence
  Synthetic
aacagagaacccaacguggg

SEQ ID NO: 807785 - RNA, 20 nt, Artificial Sequence
  Synthetic
ccugccaaaggucacguggg

SEQ ID NO: 807786 - RNA, 20 nt, Artificial Sequence
  Synthetic
cuuugggaggccuacguggg

SEQ ID NO: 807787 - RNA, 20 nt, Artificial Sequence
  Synthetic
uuuuauuaaaucuccguggg

SEQ ID NO: 807788 - RNA, 20 nt, Artificial Sequence
  Synthetic
uguggggagaggugcguggg

SEQ ID NO: 807789 - RNA, 20 nt, Artificial Sequence
  Synthetic
ugugggaaggaccucguggg

SEQ ID NO: 807790 - RNA, 20 nt, Artificial Sequence
  Synthetic
cuuugagagaccaagguggg

SEQ ID NO: 807791 - RNA, 20 nt, Artificial Sequence
  Synthetic
uggguaaaacccaagguggg

SEQ ID NO: 807792 - RNA, 20 nt, Artificial Sequence
  Synthetic
cguugucaggccaagguggg

SEQ ID NO: 807793 - RNA, 20 nt, Artificial Sequence
  Synthetic
cuucgggaggccaagguggg

SEQ ID NO: 807794 - RNA, 20 nt, Artificial Sequence
  Synthetic
cuuugggaggccaagguggg

SEQ ID NO: 807795 - RNA, 20 nt, Artificial Sequence
  Synthetic
cuuugggaguccaagguggg

SEQ ID NO: 807796 - RNA, 20 nt, Artificial Sequence
  Synthetic
cuuuggaaggcuaagguggg

SEQ ID NO: 807797 - RNA, 20 nt, Artificial Sequence
  Synthetic
ucuaguagcuguaagguggg

SEQ ID NO: 807798 - RNA, 20 nt, Artificial Sequence
  Synthetic
ccuaaagauacagagguggg

SEQ ID NO: 807799 - RNA, 20 nt, Artificial Sequence
  Synthetic
acaaauaacagagagguggg

SEQ ID NO: 807800 - RNA, 20 nt, Artificial Sequence
  Synthetic
cuuugggaggccgagguggg

SEQ ID NO: 807801 - RNA, 20 nt, Artificial Sequence
  Synthetic
cuuugugaggccgagguggg

SEQ ID NO: 807802 - RNA, 20 nt, Artificial Sequence
  Synthetic
cuuuggggggccgagguggg

SEQ ID NO: 807803 - RNA, 20 nt, Artificial Sequence
  Synthetic
aagacuucucuggagguggg

SEQ ID NO: 807804 - RNA, 20 nt, Artificial Sequence
  Synthetic
ucucagaaggcugagguggg

SEQ ID NO: 807805 - RNA, 20 nt, Artificial Sequence
  Synthetic
acucaggaggcugagguggg

SEQ ID NO: 807806 - RNA, 20 nt, Artificial Sequence
  Synthetic
acuuaggaggcugagguggg

SEQ ID NO: 807807 - RNA, 20 nt, Artificial Sequence
  Synthetic
acccgggaggcugagguggg

SEQ ID NO: 807808 - RNA, 20 nt, Artificial Sequence
  Synthetic
acuugggaggcugagguggg

SEQ ID NO: 807809 - RNA, 20 nt, Artificial Sequence
  Synthetic
cuuugggaggcugagguggg

SEQ ID NO: 807810 - RNA, 20 nt, Artificial Sequence
  Synthetic
cuuugggagucugagguggg

SEQ ID NO: 807811 - RNA, 20 nt, Artificial Sequence
  Synthetic
uuuuuuaacuaauagguggg

SEQ ID NO: 807812 - RNA, 20 nt, Artificial Sequence
  Synthetic
cugggaagaguguagguggg

SEQ ID NO: 807813 - RNA, 20 nt, Artificial Sequence
  Synthetic
augagcccccagaggguggg

SEQ ID NO: 807814 - RNA, 20 nt, Artificial Sequence
  Synthetic
acuggaguggggaggguggg

SEQ ID NO: 807815 - RNA, 20 nt, Artificial Sequence
  Synthetic
acucuaggguggaggguggg

SEQ ID NO: 807816 - RNA, 20 nt, Artificial Sequence
  Synthetic
auuagaguguggaggguggg

SEQ ID NO: 807817 - RNA, 20 nt, Artificial Sequence
  Synthetic
aggaacuucuuagggguggg

SEQ ID NO: 807818 - RNA, 20 nt, Artificial Sequence
  Synthetic
aaagcaaaaaacgggguggg

SEQ ID NO: 807819 - RNA, 20 nt, Artificial Sequence
  Synthetic
uggugccuguuggggguggg

SEQ ID NO: 807820 - RNA, 20 nt, Artificial Sequence
  Synthetic
agggccugucgugggguggg

SEQ ID NO: 807821 - RNA, 20 nt, Artificial Sequence
  Synthetic
ugaaagcagugugggguggg

SEQ ID NO: 807822 - RNA, 20 nt, Artificial Sequence
  Synthetic
auccuuuguuguuggguggg

SEQ ID NO: 807823 - RNA, 20 nt, Artificial Sequence
  Synthetic
aggcacagccugaugguggg

SEQ ID NO: 807824 - RNA, 20 nt, Artificial Sequence
  Synthetic
auccgggggaaccugguggg

SEQ ID NO: 807825 - RNA, 20 nt, Artificial Sequence
  Synthetic
caugggagugaccugguggg

SEQ ID NO: 807826 - RNA, 20 nt, Artificial Sequence
  Synthetic
uggagguggggccugguggg

SEQ ID NO: 807827 - RNA, 20 nt, Artificial Sequence
  Synthetic
ucaaaagcugcagugguggg

SEQ ID NO: 807828 - RNA, 20 nt, Artificial Sequence
  Synthetic
ccuuuugggguggugguggg

SEQ ID NO: 807829 - RNA, 20 nt, Artificial Sequence
  Synthetic
caagauuggggguugguggg

SEQ ID NO: 807830 - RNA, 20 nt, Artificial Sequence
  Synthetic
uuagaaacauaaaauguggg

SEQ ID NO: 807831 - RNA, 20 nt, Artificial Sequence
  Synthetic
auuacccuccacaauguggg

SEQ ID NO: 807832 - RNA, 20 nt, Artificial Sequence
  Synthetic
ugugggagggaccauguggg

SEQ ID NO: 807833 - RNA, 20 nt, Artificial Sequence
  Synthetic
ccuuaggagguagauguggg

SEQ ID NO: 807834 - RNA, 20 nt, Artificial Sequence
  Synthetic
cuuagggaggccgauguggg

SEQ ID NO: 807835 - RNA, 20 nt, Artificial Sequence
  Synthetic
acuugggaggcugauguggg

SEQ ID NO: 807836 - RNA, 20 nt, Artificial Sequence
  Synthetic
uguaaucccagaacuguggg

SEQ ID NO: 807837 - RNA, 20 nt, Artificial Sequence
  Synthetic
uguaaucccagcacuguggg

SEQ ID NO: 807838 - RNA, 20 nt, Artificial Sequence
  Synthetic
ugauggaaucuggguguggg

SEQ ID NO: 807839 - RNA, 20 nt, Artificial Sequence
  Synthetic
uccuuaggggaugguguggg

SEQ ID NO: 807840 - RNA, 20 nt, Artificial Sequence
  Synthetic
aauagaagauaguguguggg

SEQ ID NO: 807841 - RNA, 20 nt, Artificial Sequence
  Synthetic
uguguguguguguguguggg

SEQ ID NO: 807842 - RNA, 20 nt, Artificial Sequence
  Synthetic
auuguucucccuuguguggg

SEQ ID NO: 807843 - RNA, 20 nt, Artificial Sequence
  Synthetic
cuauaaggagcuuguguggg

SEQ ID NO: 807844 - RNA, 20 nt, Artificial Sequence
  Synthetic
aggguuggggguuguguggg

SEQ ID NO: 807845 - RNA, 20 nt, Artificial Sequence
  Synthetic
uaauccccacguguuguggg

SEQ ID NO: 807846 - RNA, 20 nt, Artificial Sequence
  Synthetic
uaauucccauguguuguggg

SEQ ID NO: 807847 - RNA, 20 nt, Artificial Sequence
  Synthetic
uaauuccuacuuguuguggg

SEQ ID NO: 807848 - RNA, 20 nt, Artificial Sequence
  Synthetic
aaauaauucuuuguuguggg

SEQ ID NO: 807849 - RNA, 20 nt, Artificial Sequence
  Synthetic
acugucauauguuuuguggg

SEQ ID NO: 807850 - RNA, 20 nt, Artificial Sequence
  Synthetic
ccacugaguauggaauuggg

SEQ ID NO: 807851 - RNA, 20 nt, Artificial Sequence
  Synthetic
uagcuguugacuuaauuggg

SEQ ID NO: 807852 - RNA, 20 nt, Artificial Sequence
  Synthetic
ugcaaucccagcacauuggg

SEQ ID NO: 807853 - RNA, 20 nt, Artificial Sequence
  Synthetic
auuuagucauucacauuggg

SEQ ID NO: 807854 - RNA, 20 nt, Artificial Sequence
  Synthetic
acaccaguugggggauuggg

SEQ ID NO: 807855 - RNA, 20 nt, Artificial Sequence
  Synthetic
aaaaagaaaaauggauuggg

SEQ ID NO: 807856 - RNA, 20 nt, Artificial Sequence
  Synthetic
aauaaaucaacacuauuggg

SEQ ID NO: 807857 - RNA, 20 nt, Artificial Sequence
  Synthetic
aucugguaaugauuauuggg

SEQ ID NO: 807858 - RNA, 20 nt, Artificial Sequence
  Synthetic
cagaaucgcuugaacuuggg

SEQ ID NO: 807859 - RNA, 20 nt, Artificial Sequence
  Synthetic
ccgcauuuaaaacacuuggg

SEQ ID NO: 807860 - RNA, 20 nt, Artificial Sequence
  Synthetic
uguaaucccagccacuuggg

SEQ ID NO: 807861 - RNA, 20 nt, Artificial Sequence
  Synthetic
uguagucccagccacuuggg

SEQ ID NO: 807862 - RNA, 20 nt, Artificial Sequence
  Synthetic
augggcuuuggagacuuggg

SEQ ID NO: 807863 - RNA, 20 nt, Artificial Sequence
  Synthetic
uuccaguucagggacuuggg

SEQ ID NO: 807864 - RNA, 20 nt, Artificial Sequence
  Synthetic
uugaaucacagcuacuuggg

SEQ ID NO: 807865 - RNA, 20 nt, Artificial Sequence
  Synthetic
ucuaaucccagcuacuuggg

SEQ ID NO: 807866 - RNA, 20 nt, Artificial Sequence
  Synthetic
uguaaucccagcuacuuggg

SEQ ID NO: 807867 - RNA, 20 nt, Artificial Sequence
  Synthetic
cuguaucccagcuacuuggg

SEQ ID NO: 807868 - RNA, 20 nt, Artificial Sequence
  Synthetic
uagagucccagcuacuuggg

SEQ ID NO: 807869 - RNA, 20 nt, Artificial Sequence
  Synthetic
uauagucccagcuacuuggg

SEQ ID NO: 807870 - RNA, 20 nt, Artificial Sequence
  Synthetic
uguagucccagcuacuuggg

SEQ ID NO: 807871 - RNA, 20 nt, Artificial Sequence
  Synthetic
uguaaucucagcuacuuggg

SEQ ID NO: 807872 - RNA, 20 nt, Artificial Sequence
  Synthetic
uguagucucagcuacuuggg

SEQ ID NO: 807873 - RNA, 20 nt, Artificial Sequence
  Synthetic
uguaauccuagcuacuuggg

SEQ ID NO: 807874 - RNA, 20 nt, Artificial Sequence
  Synthetic
uguagaccuggcuacuuggg

SEQ ID NO: 807875 - RNA, 20 nt, Artificial Sequence
  Synthetic
uguagucucugcuacuuggg

SEQ ID NO: 807876 - RNA, 20 nt, Artificial Sequence
  Synthetic
uguaaucccagguacuuggg

SEQ ID NO: 807877 - RNA, 20 nt, Artificial Sequence
  Synthetic
ucuuagguucauuacuuggg

SEQ ID NO: 807878 - RNA, 20 nt, Artificial Sequence
  Synthetic
aguggugagccauccuuggg

SEQ ID NO: 807879 - RNA, 20 nt, Artificial Sequence
  Synthetic
caaucagaacucagcuuggg

SEQ ID NO: 807880 - RNA, 20 nt, Artificial Sequence
  Synthetic
ucaugaauuuucagcuuggg

SEQ ID NO: 807881 - RNA, 20 nt, Artificial Sequence
  Synthetic
augguuaacagaggcuuggg

SEQ ID NO: 807882 - RNA, 20 nt, Artificial Sequence
  Synthetic
acuaccacacagggcuuggg

SEQ ID NO: 807883 - RNA, 20 nt, Artificial Sequence
  Synthetic
uacaugcugauuggcuuggg

SEQ ID NO: 807884 - RNA, 20 nt, Artificial Sequence
  Synthetic
ucuaaucccagcugcuuggg

SEQ ID NO: 807885 - RNA, 20 nt, Artificial Sequence
  Synthetic
agcaaagugaaccucuuggg

SEQ ID NO: 807886 - RNA, 20 nt, Artificial Sequence
  Synthetic
uguaaucucagccucuuggg

SEQ ID NO: 807887 - RNA, 20 nt, Artificial Sequence
  Synthetic
uccaagccuggagucuuggg

SEQ ID NO: 807888 - RNA, 20 nt, Artificial Sequence
  Synthetic
cuuccugguuuagucuuggg

SEQ ID NO: 807889 - RNA, 20 nt, Artificial Sequence
  Synthetic
cacugcugugguuucuuggg

SEQ ID NO: 807890 - RNA, 20 nt, Artificial Sequence
  Synthetic
aaaguguuaaacaaguuggg

SEQ ID NO: 807891 - RNA, 20 nt, Artificial Sequence
  Synthetic
cagagguugaaacaguuggg

SEQ ID NO: 807892 - RNA, 20 nt, Artificial Sequence
  Synthetic
agagaaguguuucaguuggg

SEQ ID NO: 807893 - RNA, 20 nt, Artificial Sequence
  Synthetic
aucagaggguggagguuggg

SEQ ID NO: 807894 - RNA, 20 nt, Artificial Sequence
  Synthetic
cuugggaggcugagguuggg

SEQ ID NO: 807895 - RNA, 20 nt, Artificial Sequence
  Synthetic
cacacaguggugggguuggg

SEQ ID NO: 807896 - RNA, 20 nt, Artificial Sequence
  Synthetic
aauaucacuuaaugguuggg

SEQ ID NO: 807897 - RNA, 20 nt, Artificial Sequence
  Synthetic
aaaagcuauuucugguuggg

SEQ ID NO: 807898 - RNA, 20 nt, Artificial Sequence
  Synthetic
acuauguauaugauguuggg

SEQ ID NO: 807899 - RNA, 20 nt, Artificial Sequence
  Synthetic
aagacuuagauuauguuggg

SEQ ID NO: 807900 - RNA, 20 nt, Artificial Sequence
  Synthetic
uguauucugcuacuguuggg

SEQ ID NO: 807901 - RNA, 20 nt, Artificial Sequence
  Synthetic
ucugcuagucuucuguuggg

SEQ ID NO: 807902 - RNA, 20 nt, Artificial Sequence
  Synthetic
acuauuguguguguguuggg

SEQ ID NO: 807903 - RNA, 20 nt, Artificial Sequence
  Synthetic
cucacaaacauauuguuggg

SEQ ID NO: 807904 - RNA, 20 nt, Artificial Sequence
  Synthetic
aauauggccuccuuguuggg

SEQ ID NO: 807905 - RNA, 20 nt, Artificial Sequence
  Synthetic
auucauccuuuguuguuggg

SEQ ID NO: 807906 - RNA, 20 nt, Artificial Sequence
  Synthetic
uguaaucccagcaauuuggg

SEQ ID NO: 807907 - RNA, 20 nt, Artificial Sequence
  Synthetic
uguaauaucagcaauuuggg

SEQ ID NO: 807908 - RNA, 20 nt, Artificial Sequence
  Synthetic
aauucaaaaugagauuuggg

SEQ ID NO: 807909 - RNA, 20 nt, Artificial Sequence
  Synthetic
aauucagaaugagauuuggg

SEQ ID NO: 807910 - RNA, 20 nt, Artificial Sequence
  Synthetic
aauucaacaugagauuuggg

SEQ ID NO: 807911 - RNA, 20 nt, Artificial Sequence
  Synthetic
aaagggacaugagauuuggg

SEQ ID NO: 807912 - RNA, 20 nt, Artificial Sequence
  Synthetic
aauucaagaugagauuuggg

SEQ ID NO: 807913 - RNA, 20 nt, Artificial Sequence
  Synthetic
auuucaagaugagauuuggg

SEQ ID NO: 807914 - RNA, 20 nt, Artificial Sequence
  Synthetic
aauuuaauaugagauuuggg

SEQ ID NO: 807915 - RNA, 20 nt, Artificial Sequence
  Synthetic
aauucaaggugagauuuggg

SEQ ID NO: 807916 - RNA, 20 nt, Artificial Sequence
  Synthetic
aauucaagacgggauuuggg

SEQ ID NO: 807917 - RNA, 20 nt, Artificial Sequence
  Synthetic
aaaagaaacagugauuuggg

SEQ ID NO: 807918 - RNA, 20 nt, Artificial Sequence
  Synthetic
uguaaucccagcuauuuggg

SEQ ID NO: 807919 - RNA, 20 nt, Artificial Sequence
  Synthetic
uguagucccagcuauuuggg

SEQ ID NO: 807920 - RNA, 20 nt, Artificial Sequence
  Synthetic
ucuagucccaguuauuuggg

SEQ ID NO: 807921 - RNA, 20 nt, Artificial Sequence
  Synthetic
uauaaucccaacacuuuggg

SEQ ID NO: 807922 - RNA, 20 nt, Artificial Sequence
  Synthetic
uguaaucccaacacuuuggg

SEQ ID NO: 807923 - RNA, 20 nt, Artificial Sequence
  Synthetic
ucuacucccaacacuuuggg

SEQ ID NO: 807924 - RNA, 20 nt, Artificial Sequence
  Synthetic
uguaaucucaacacuuuggg

SEQ ID NO: 807925 - RNA, 20 nt, Artificial Sequence
  Synthetic
uguaauccuaacacuuuggg

SEQ ID NO: 807926 - RNA, 20 nt, Artificial Sequence
  Synthetic
uguaaucccaccacuuuggg

SEQ ID NO: 807927 - RNA, 20 nt, Artificial Sequence
  Synthetic
uguaauccaagcacuuuggg

SEQ ID NO: 807928 - RNA, 20 nt, Artificial Sequence
  Synthetic
uguaauaccagcacuuuggg

SEQ ID NO: 807929 - RNA, 20 nt, Artificial Sequence
  Synthetic
uguaaacccagcacuuuggg

SEQ ID NO: 807930 - RNA, 20 nt, Artificial Sequence
  Synthetic
uguaaccccagcacuuuggg

SEQ ID NO: 807931 - RNA, 20 nt, Artificial Sequence
  Synthetic
ugcaaucccagcacuuuggg

SEQ ID NO: 807932 - RNA, 20 nt, Artificial Sequence
  Synthetic
cauaaucccagcacuuuggg

SEQ ID NO: 807933 - RNA, 20 nt, Artificial Sequence
  Synthetic
uauaaucccagcacuuuggg

SEQ ID NO: 807934 - RNA, 20 nt, Artificial Sequence
  Synthetic
aguaaucccagcacuuuggg

SEQ ID NO: 807935 - RNA, 20 nt, Artificial Sequence
  Synthetic
cguaaucccagcacuuuggg

SEQ ID NO: 807936 - RNA, 20 nt, Artificial Sequence
  Synthetic
uguaaucccagcacuuuggg

SEQ ID NO: 807937 - RNA, 20 nt, Artificial Sequence
  Synthetic
cuguaucccagcacuuuggg

SEQ ID NO: 807938 - RNA, 20 nt, Artificial Sequence
  Synthetic
uguacucccagcacuuuggg

SEQ ID NO: 807939 - RNA, 20 nt, Artificial Sequence
  Synthetic
uguaauuccagcacuuuggg

SEQ ID NO: 807940 - RNA, 20 nt, Artificial Sequence
  Synthetic
uguaaucgcagcacuuuggg

SEQ ID NO: 807941 - RNA, 20 nt, Artificial Sequence
  Synthetic
cgguggcucagcacuuuggg

SEQ ID NO: 807942 - RNA, 20 nt, Artificial Sequence
  Synthetic
uguaaucucagcacuuuggg

SEQ ID NO: 807943 - RNA, 20 nt, Artificial Sequence
  Synthetic
uauaauccuagcacuuuggg

SEQ ID NO: 807944 - RNA, 20 nt, Artificial Sequence
  Synthetic
uguaauccuagcacuuuggg

SEQ ID NO: 807945 - RNA, 20 nt, Artificial Sequence
  Synthetic
ugugauuuuagcacuuuggg

SEQ ID NO: 807946 - RNA, 20 nt, Artificial Sequence
  Synthetic
uguaauccccgcacuuuggg

SEQ ID NO: 807947 - RNA, 20 nt, Artificial Sequence
  Synthetic
ccuaauuuugagacuuuggg

SEQ ID NO: 807948 - RNA, 20 nt, Artificial Sequence
  Synthetic
uguaaucccaggacuuuggg

SEQ ID NO: 807949 - RNA, 20 nt, Artificial Sequence
  Synthetic
uguaacccuaggacuuuggg

SEQ ID NO: 807950 - RNA, 20 nt, Artificial Sequence
  Synthetic
uguaaucccaguacuuuggg

SEQ ID NO: 807951 - RNA, 20 nt, Artificial Sequence
  Synthetic
uguaauccuaguacuuuggg

SEQ ID NO: 807952 - RNA, 20 nt, Artificial Sequence
  Synthetic
ugcacucccagcgcuuuggg

SEQ ID NO: 807953 - RNA, 20 nt, Artificial Sequence
  Synthetic
uguaauuccagcgcuuuggg

SEQ ID NO: 807954 - RNA, 20 nt, Artificial Sequence
  Synthetic
uguaaucccagugcuuuggg

SEQ ID NO: 807955 - RNA, 20 nt, Artificial Sequence
  Synthetic
ugucaucucagugcuuuggg

SEQ ID NO: 807956 - RNA, 20 nt, Artificial Sequence
  Synthetic
uguaauccuagugcuuuggg

SEQ ID NO: 807957 - RNA, 20 nt, Artificial Sequence
  Synthetic
uguaauccaggugcuuuggg

SEQ ID NO: 807958 - RNA, 20 nt, Artificial Sequence
  Synthetic
uguaaucccugugcuuuggg

SEQ ID NO: 807959 - RNA, 20 nt, Artificial Sequence
  Synthetic
cacagcagcacagguuuggg

SEQ ID NO: 807960 - RNA, 20 nt, Artificial Sequence
  Synthetic
uuagaagguggggguuuggg

SEQ ID NO: 807961 - RNA, 20 nt, Artificial Sequence
  Synthetic
uaaauuuuuguuuguuuggg

SEQ ID NO: 807962 - RNA, 20 nt, Artificial Sequence
  Synthetic
cagcacaagagcauuuuggg

SEQ ID NO: 807963 - RNA, 20 nt, Artificial Sequence
  Synthetic
uguaaucucggcauuuuggg

SEQ ID NO: 807964 - RNA, 20 nt, Artificial Sequence
  Synthetic
caggaguaacauauuuuggg

SEQ ID NO: 807965 - RNA, 20 nt, Artificial Sequence
  Synthetic
aauuauguauuuauuuuggg

SEQ ID NO: 807966 - RNA, 20 nt, Artificial Sequence
  Synthetic
cuuuggauuuuaguuuuggg

SEQ ID NO: 807967 - RNA, 20 nt, Artificial Sequence
  Synthetic
uguaaucucagcguuuuggg

SEQ ID NO: 807968 - RNA, 20 nt, Artificial Sequence
  Synthetic
acuggaaaguauguuuuggg

SEQ ID NO: 807969 - RNA, 20 nt, Artificial Sequence
  Synthetic
aauauucccuuuguuuuggg

SEQ ID NO: 807970 - RNA, 20 nt, Artificial Sequence
  Synthetic
ccuucaagaagauuuuuggg

SEQ ID NO: 807971 - RNA, 20 nt, Artificial Sequence
  Synthetic
augagcuacauauuuuuggg

SEQ ID NO: 807972 - RNA, 20 nt, Artificial Sequence
  Synthetic
auagaauccccaaaaaaugg

SEQ ID NO: 807973 - RNA, 20 nt, Artificial Sequence
  Synthetic
cagggauuugacaaaaaugg

SEQ ID NO: 807974 - RNA, 20 nt, Artificial Sequence
  Synthetic
agagaaacagagaaaaaugg

SEQ ID NO: 807975 - RNA, 20 nt, Artificial Sequence
  Synthetic
aggaauuagcuacaaaaugg

SEQ ID NO: 807976 - RNA, 20 nt, Artificial Sequence
  Synthetic
uuuuugauauuacaaaaugg

SEQ ID NO: 807977 - RNA, 20 nt, Artificial Sequence
  Synthetic
cacuggggcuugcaaaaugg

SEQ ID NO: 807978 - RNA, 20 nt, Artificial Sequence
  Synthetic
ugcaaugguucucaaaaugg

SEQ ID NO: 807979 - RNA, 20 nt, Artificial Sequence
  Synthetic
uauuacagaggagaaaaugg

SEQ ID NO: 807980 - RNA, 20 nt, Artificial Sequence
  Synthetic
uuucgucaacuguaaaaugg

SEQ ID NO: 807981 - RNA, 20 nt, Artificial Sequence
  Synthetic
aucuggccuaggacaaaugg

SEQ ID NO: 807982 - RNA, 20 nt, Artificial Sequence
  Synthetic
aguagauuuccuccaaaugg

SEQ ID NO: 807983 - RNA, 20 nt, Artificial Sequence
  Synthetic
cuaugauacaaggcaaaugg

SEQ ID NO: 807984 - RNA, 20 nt, Artificial Sequence
  Synthetic
acagaucuguugagaaaugg

SEQ ID NO: 807985 - RNA, 20 nt, Artificial Sequence
  Synthetic
aacaacauggauggaaaugg

SEQ ID NO: 807986 - RNA, 20 nt, Artificial Sequence
  Synthetic
aacaacauuguuggaaaugg

SEQ ID NO: 807987 - RNA, 20 nt, Artificial Sequence
  Synthetic
ucaugcuuugauugaaaugg

SEQ ID NO: 807988 - RNA, 20 nt, Artificial Sequence
  Synthetic
cauuuuugcccuguaaaugg

SEQ ID NO: 807989 - RNA, 20 nt, Artificial Sequence
  Synthetic
cacacugucuuccacaaugg

SEQ ID NO: 807990 - RNA, 20 nt, Artificial Sequence
  Synthetic
acaggugcuugggacaaugg

SEQ ID NO: 807991 - RNA, 20 nt, Artificial Sequence
  Synthetic
uuacuuccaggauacaaugg

SEQ ID NO: 807992 - RNA, 20 nt, Artificial Sequence
  Synthetic
agaaacagaaaguacaaugg

SEQ ID NO: 807993 - RNA, 20 nt, Artificial Sequence
  Synthetic
uuacuuucuagguacaaugg

SEQ ID NO: 807994 - RNA, 20 nt, Artificial Sequence
  Synthetic
uggggauugucuuacaaugg

SEQ ID NO: 807995 - RNA, 20 nt, Artificial Sequence
  Synthetic
uuuaauauaaagagcaaugg

SEQ ID NO: 807996 - RNA, 20 nt, Artificial Sequence
  Synthetic
aauugcauguaaugcaaugg

SEQ ID NO: 807997 - RNA, 20 nt, Artificial Sequence
  Synthetic
cauucauggcaaaucaaugg

SEQ ID NO: 807998 - RNA, 20 nt, Artificial Sequence
  Synthetic
accuagaugaccaucaaugg

SEQ ID NO: 807999 - RNA, 20 nt, Artificial Sequence
  Synthetic
ccauaguaagugcucaaugg

SEQ ID NO: 808000 - RNA, 20 nt, Artificial Sequence
  Synthetic
uuauagaaucuucucaaugg

SEQ ID NO: 808001 - RNA, 20 nt, Artificial Sequence
  Synthetic
auaguauuuuuaaagaaugg

SEQ ID NO: 808002 - RNA, 20 nt, Artificial Sequence
  Synthetic
ccauuagaauggaagaaugg

SEQ ID NO: 808003 - RNA, 20 nt, Artificial Sequence
  Synthetic
caagaagucacacagaaugg

SEQ ID NO: 808004 - RNA, 20 nt, Artificial Sequence
  Synthetic
aacacauaagaucagaaugg

SEQ ID NO: 808005 - RNA, 20 nt, Artificial Sequence
  Synthetic
uaggaauaugcagagaaugg

SEQ ID NO: 808006 - RNA, 20 nt, Artificial Sequence
  Synthetic
auagacaggaaauagaaugg

SEQ ID NO: 808007 - RNA, 20 nt, Artificial Sequence
  Synthetic
uccuccaaagaguagaaugg

SEQ ID NO: 808008 - RNA, 20 nt, Artificial Sequence
  Synthetic
ugaaguagagaguagaaugg

SEQ ID NO: 808009 - RNA, 20 nt, Artificial Sequence
  Synthetic
cugaaaggacaaacgaaugg

SEQ ID NO: 808010 - RNA, 20 nt, Artificial Sequence
  Synthetic
aggaagagaggaaggaaugg

SEQ ID NO: 808011 - RNA, 20 nt, Artificial Sequence
  Synthetic
aaaggaagaaggaggaaugg

SEQ ID NO: 808012 - RNA, 20 nt, Artificial Sequence
  Synthetic
aucuggggcauuaggaaugg

SEQ ID NO: 808013 - RNA, 20 nt, Artificial Sequence
  Synthetic
uugucucuggcagggaaugg

SEQ ID NO: 808014 - RNA, 20 nt, Artificial Sequence
  Synthetic
caucugagacccgggaaugg

SEQ ID NO: 808015 - RNA, 20 nt, Artificial Sequence
  Synthetic
agacaacccuuggggaaugg

SEQ ID NO: 808016 - RNA, 20 nt, Artificial Sequence
  Synthetic
aacacauacaaaaugaaugg

SEQ ID NO: 808017 - RNA, 20 nt, Artificial Sequence
  Synthetic
ucugccuacacaaugaaugg

SEQ ID NO: 808018 - RNA, 20 nt, Artificial Sequence
  Synthetic
uauuggaggguuuugaaugg

SEQ ID NO: 808019 - RNA, 20 nt, Artificial Sequence
  Synthetic
uuggcuauaaugaauaaugg

SEQ ID NO: 808020 - RNA, 20 nt, Artificial Sequence
  Synthetic
uuuucacgagaagauaaugg

SEQ ID NO: 808021 - RNA, 20 nt, Artificial Sequence
  Synthetic
cuucuccuucaggauaaugg

SEQ ID NO: 808022 - RNA, 20 nt, Artificial Sequence
  Synthetic
ucugugugauacuauaaugg

SEQ ID NO: 808023 - RNA, 20 nt, Artificial Sequence
  Synthetic
caaaaauauaugacuaaugg

SEQ ID NO: 808024 - RNA, 20 nt, Artificial Sequence
  Synthetic
ucuuacacuucaaguaaugg

SEQ ID NO: 808025 - RNA, 20 nt, Artificial Sequence
  Synthetic
cuggagucaaauaguaaugg

SEQ ID NO: 808026 - RNA, 20 nt, Artificial Sequence
  Synthetic
aaugugauuauuuguaaugg

SEQ ID NO: 808027 - RNA, 20 nt, Artificial Sequence
  Synthetic
accuaggugcccauuaaugg

SEQ ID NO: 808028 - RNA, 20 nt, Artificial Sequence
  Synthetic
aaaaaaauguucauuaaugg

SEQ ID NO: 808029 - RNA, 20 nt, Artificial Sequence
  Synthetic
ugugcagccuggcuuaaugg

SEQ ID NO: 808030 - RNA, 20 nt, Artificial Sequence
  Synthetic
caauggauauuuguuaaugg

SEQ ID NO: 808031 - RNA, 20 nt, Artificial Sequence
  Synthetic
uuuuauuagcuauuuaaugg

SEQ ID NO: 808032 - RNA, 20 nt, Artificial Sequence
  Synthetic
cuuuucaauaaaaaacaugg

SEQ ID NO: 808033 - RNA, 20 nt, Artificial Sequence
  Synthetic
uuucauauaguaaaacaugg

SEQ ID NO: 808034 - RNA, 20 nt, Artificial Sequence
  Synthetic
aucuguaauauguaacaugg

SEQ ID NO: 808035 - RNA, 20 nt, Artificial Sequence
  Synthetic
uuugugguugucacacaugg

SEQ ID NO: 808036 - RNA, 20 nt, Artificial Sequence
  Synthetic
acauacguauagucacaugg

SEQ ID NO: 808037 - RNA, 20 nt, Artificial Sequence
  Synthetic
acaaaauuagccagacaugg

SEQ ID NO: 808038 - RNA, 20 nt, Artificial Sequence
  Synthetic
cucacggguaggagacaugg

SEQ ID NO: 808039 - RNA, 20 nt, Artificial Sequence
  Synthetic
aaaaaauuagcuggacaugg

SEQ ID NO: 808040 - RNA, 20 nt, Artificial Sequence
  Synthetic
uacaaacaguuuggacaugg

SEQ ID NO: 808041 - RNA, 20 nt, Artificial Sequence
  Synthetic
uuucuaguacuaugacaugg

SEQ ID NO: 808042 - RNA, 20 nt, Artificial Sequence
  Synthetic
uuucaguacaguauacaugg

SEQ ID NO: 808043 - RNA, 20 nt, Artificial Sequence
  Synthetic
ucaaaccuaaaacuacaugg

SEQ ID NO: 808044 - RNA, 20 nt, Artificial Sequence
  Synthetic
uucgguguguccuuacaugg

SEQ ID NO: 808045 - RNA, 20 nt, Artificial Sequence
  Synthetic
caaaggcauggcuuacaugg

SEQ ID NO: 808046 - RNA, 20 nt, Artificial Sequence
  Synthetic
cuccaauguugcuuacaugg

SEQ ID NO: 808047 - RNA, 20 nt, Artificial Sequence
  Synthetic
aaguuuacaaccaaccaugg

SEQ ID NO: 808048 - RNA, 20 nt, Artificial Sequence
  Synthetic
ugggagaaaguacaccaugg

SEQ ID NO: 808049 - RNA, 20 nt, Artificial Sequence
  Synthetic
agauguaagagauaccaugg

SEQ ID NO: 808050 - RNA, 20 nt, Artificial Sequence
  Synthetic
uaaggagggaucggccaugg

SEQ ID NO: 808051 - RNA, 20 nt, Artificial Sequence
  Synthetic
cuugccuugucuggccaugg

SEQ ID NO: 808052 - RNA, 20 nt, Artificial Sequence
  Synthetic
uagguauacacaugccaugg

SEQ ID NO: 808053 - RNA, 20 nt, Artificial Sequence
  Synthetic
cauuauaguuucugccaugg

SEQ ID NO: 808054 - RNA, 20 nt, Artificial Sequence
  Synthetic
uagguauacacgugccaugg

SEQ ID NO: 808055 - RNA, 20 nt, Artificial Sequence
  Synthetic
uagguaaacaugugccaugg

SEQ ID NO: 808056 - RNA, 20 nt, Artificial Sequence
  Synthetic
uagguauacaugugccaugg

SEQ ID NO: 808057 - RNA, 20 nt, Artificial Sequence
  Synthetic
ucuugguucuguugccaugg

SEQ ID NO: 808058 - RNA, 20 nt, Artificial Sequence
  Synthetic
uugucccucaguauccaugg

SEQ ID NO: 808059 - RNA, 20 nt, Artificial Sequence
  Synthetic
uuuaugaacauaguccaugg

SEQ ID NO: 808060 - RNA, 20 nt, Artificial Sequence
  Synthetic
ucuugucacuucuuccaugg

SEQ ID NO: 808061 - RNA, 20 nt, Artificial Sequence
  Synthetic
uagguguacacguuccaugg

SEQ ID NO: 808062 - RNA, 20 nt, Artificial Sequence
  Synthetic
ucccugucuuuuuuccaugg

SEQ ID NO: 808063 - RNA, 20 nt, Artificial Sequence
  Synthetic
cacaugggaaaacagcaugg

SEQ ID NO: 808064 - RNA, 20 nt, Artificial Sequence
  Synthetic
cuaucacgacaacagcaugg

SEQ ID NO: 808065 - RNA, 20 nt, Artificial Sequence
  Synthetic
cuaucaugagaacagcaugg

SEQ ID NO: 808066 - RNA, 20 nt, Artificial Sequence
  Synthetic
caaaaauuagcugagcaugg

SEQ ID NO: 808067 - RNA, 20 nt, Artificial Sequence
  Synthetic
cuaucaugagaauagcaugg

SEQ ID NO: 808068 - RNA, 20 nt, Artificial Sequence
  Synthetic
uuuaagaucucuuagcaugg

SEQ ID NO: 808069 - RNA, 20 nt, Artificial Sequence
  Synthetic
aaaagaguaccugcgcaugg

SEQ ID NO: 808070 - RNA, 20 nt, Artificial Sequence
  Synthetic
acauuaagaauaaggcaugg

SEQ ID NO: 808071 - RNA, 20 nt, Artificial Sequence
  Synthetic
auaauccccaccaggcaugg

SEQ ID NO: 808072 - RNA, 20 nt, Artificial Sequence
  Synthetic
agugucucgaccaggcaugg

SEQ ID NO: 808073 - RNA, 20 nt, Artificial Sequence
  Synthetic
acaaaaucagccaggcaugg

SEQ ID NO: 808074 - RNA, 20 nt, Artificial Sequence
  Synthetic
aaaaaauuagccaggcaugg

SEQ ID NO: 808075 - RNA, 20 nt, Artificial Sequence
  Synthetic
caaaaauuagccaggcaugg

SEQ ID NO: 808076 - RNA, 20 nt, Artificial Sequence
  Synthetic
acaaaauuagccaggcaugg

SEQ ID NO: 808077 - RNA, 20 nt, Artificial Sequence
  Synthetic
ugauucagggccaggcaugg

SEQ ID NO: 808078 - RNA, 20 nt, Artificial Sequence
  Synthetic
ccaaucuuggccaggcaugg

SEQ ID NO: 808079 - RNA, 20 nt, Artificial Sequence
  Synthetic
auccaguuggccaggcaugg

SEQ ID NO: 808080 - RNA, 20 nt, Artificial Sequence
  Synthetic
aaaaaauuugccaggcaugg

SEQ ID NO: 808081 - RNA, 20 nt, Artificial Sequence
  Synthetic
caaaaauuagcagggcaugg

SEQ ID NO: 808082 - RNA, 20 nt, Artificial Sequence
  Synthetic
aaaaaauuagccgggcaugg

SEQ ID NO: 808083 - RNA, 20 nt, Artificial Sequence
  Synthetic
caaaaauuagccgggcaugg

SEQ ID NO: 808084 - RNA, 20 nt, Artificial Sequence
  Synthetic
acaaaauuagccgggcaugg

SEQ ID NO: 808085 - RNA, 20 nt, Artificial Sequence
  Synthetic
uuuuuggaggccgggcaugg

SEQ ID NO: 808086 - RNA, 20 nt, Artificial Sequence
  Synthetic
aaaaaacuggccgggcaugg

SEQ ID NO: 808087 - RNA, 20 nt, Artificial Sequence
  Synthetic
ugcaagcagguggggcaugg

SEQ ID NO: 808088 - RNA, 20 nt, Artificial Sequence
  Synthetic
aaaaaaauagcugggcaugg

SEQ ID NO: 808089 - RNA, 20 nt, Artificial Sequence
  Synthetic
aaaaaauuagcugggcaugg

SEQ ID NO: 808090 - RNA, 20 nt, Artificial Sequence
  Synthetic
caaaaauuagcugggcaugg

SEQ ID NO: 808091 - RNA, 20 nt, Artificial Sequence
  Synthetic
acaaaauuagcugggcaugg

SEQ ID NO: 808092 - RNA, 20 nt, Artificial Sequence
  Synthetic
ucaauuucggcugggcaugg

SEQ ID NO: 808093 - RNA, 20 nt, Artificial Sequence
  Synthetic
aaaagaggggcugggcaugg

SEQ ID NO: 808094 - RNA, 20 nt, Artificial Sequence
  Synthetic
aucaaguuggcugggcaugg

SEQ ID NO: 808095 - RNA, 20 nt, Artificial Sequence
  Synthetic
accugggguagugggcaugg

SEQ ID NO: 808096 - RNA, 20 nt, Artificial Sequence
  Synthetic
caaacauuaggugggcaugg

SEQ ID NO: 808097 - RNA, 20 nt, Artificial Sequence
  Synthetic
aaaaaauuaguugggcaugg

SEQ ID NO: 808098 - RNA, 20 nt, Artificial Sequence
  Synthetic
aauugcugggaucugcaugg

SEQ ID NO: 808099 - RNA, 20 nt, Artificial Sequence
  Synthetic
agguggugacaggugcaugg

SEQ ID NO: 808100 - RNA, 20 nt, Artificial Sequence
  Synthetic
agaagucuuuuaaaucaugg

SEQ ID NO: 808101 - RNA, 20 nt, Artificial Sequence
  Synthetic
ccggaaacuuacaaucaugg

SEQ ID NO: 808102 - RNA, 20 nt, Artificial Sequence
  Synthetic
caggaaacuuauaaucaugg

SEQ ID NO: 808103 - RNA, 20 nt, Artificial Sequence
  Synthetic
ugguguggucugcaucaugg

SEQ ID NO: 808104 - RNA, 20 nt, Artificial Sequence
  Synthetic
ugaagcccacuugaucaugg

SEQ ID NO: 808105 - RNA, 20 nt, Artificial Sequence
  Synthetic
uagguauacauguaucaugg

SEQ ID NO: 808106 - RNA, 20 nt, Artificial Sequence
  Synthetic
cagggagcuuuuacucaugg

SEQ ID NO: 808107 - RNA, 20 nt, Artificial Sequence
  Synthetic
uuuuaauggccugcucaugg

SEQ ID NO: 808108 - RNA, 20 nt, Artificial Sequence
  Synthetic
aggccugcauauucucaugg

SEQ ID NO: 808109 - RNA, 20 nt, Artificial Sequence
  Synthetic
cgggaaguguggggucaugg

SEQ ID NO: 808110 - RNA, 20 nt, Artificial Sequence
  Synthetic
uagguaaacucaugucaugg

SEQ ID NO: 808111 - RNA, 20 nt, Artificial Sequence
  Synthetic
uagguaaacuugugucaugg

SEQ ID NO: 808112 - RNA, 20 nt, Artificial Sequence
  Synthetic
uauguuuauagccuucaugg

SEQ ID NO: 808113 - RNA, 20 nt, Artificial Sequence
  Synthetic
aagguaaccaugcuucaugg

SEQ ID NO: 808114 - RNA, 20 nt, Artificial Sequence
  Synthetic
uguauuuggucauuucaugg

SEQ ID NO: 808115 - RNA, 20 nt, Artificial Sequence
  Synthetic
cauuuggucuucuuucaugg

SEQ ID NO: 808116 - RNA, 20 nt, Artificial Sequence
  Synthetic
uuuugucucauuuuucaugg

SEQ ID NO: 808117 - RNA, 20 nt, Artificial Sequence
  Synthetic
cacuagcugagcaaagaugg

SEQ ID NO: 808118 - RNA, 20 nt, Artificial Sequence
  Synthetic
aaguggugccagaaagaugg

SEQ ID NO: 808119 - RNA, 20 nt, Artificial Sequence
  Synthetic
ccauaaaaagagaaagaugg

SEQ ID NO: 808120 - RNA, 20 nt, Artificial Sequence
  Synthetic
ucuauuuggaggaaagaugg

SEQ ID NO: 808121 - RNA, 20 nt, Artificial Sequence
  Synthetic
aauugauuuuuuaaagaugg

SEQ ID NO: 808122 - RNA, 20 nt, Artificial Sequence
  Synthetic
cuccaaagggaacaagaugg

SEQ ID NO: 808123 - RNA, 20 nt, Artificial Sequence
  Synthetic
uggcuuagagaagaagaugg

SEQ ID NO: 808124 - RNA, 20 nt, Artificial Sequence
  Synthetic
uggcugugagcugaagaugg

SEQ ID NO: 808125 - RNA, 20 nt, Artificial Sequence
  Synthetic
aaggaaaaucacacagaugg

SEQ ID NO: 808126 - RNA, 20 nt, Artificial Sequence
  Synthetic
uaaaggaaaaccacagaugg

SEQ ID NO: 808127 - RNA, 20 nt, Artificial Sequence
  Synthetic
auuuaucacauagcagaugg

SEQ ID NO: 808128 - RNA, 20 nt, Artificial Sequence
  Synthetic
aaggcuugcauggcagaugg

SEQ ID NO: 808129 - RNA, 20 nt, Artificial Sequence
  Synthetic
augauaaguguuucagaugg

SEQ ID NO: 808130 - RNA, 20 nt, Artificial Sequence
  Synthetic
uguauuuuuaguagagaugg

SEQ ID NO: 808131 - RNA, 20 nt, Artificial Sequence
  Synthetic
ugcugucaauguagagaugg

SEQ ID NO: 808132 - RNA, 20 nt, Artificial Sequence
  Synthetic
aagcuauucuggggagaugg

SEQ ID NO: 808133 - RNA, 20 nt, Artificial Sequence
  Synthetic
augagaacacauggagaugg

SEQ ID NO: 808134 - RNA, 20 nt, Artificial Sequence
  Synthetic
cuucugaggaggugagaugg

SEQ ID NO: 808135 - RNA, 20 nt, Artificial Sequence
  Synthetic
agaguuuuggagauagaugg

SEQ ID NO: 808136 - RNA, 20 nt, Artificial Sequence
  Synthetic
augccaauuaacguagaugg

SEQ ID NO: 808137 - RNA, 20 nt, Artificial Sequence
  Synthetic
uuaaauaauuggguagaugg

SEQ ID NO: 808138 - RNA, 20 nt, Artificial Sequence
  Synthetic
aaaaguauguguguagaugg

SEQ ID NO: 808139 - RNA, 20 nt, Artificial Sequence
  Synthetic
uucuacuggcuuuuagaugg

SEQ ID NO: 808140 - RNA, 20 nt, Artificial Sequence
  Synthetic
aucuuggcaagaagcgaugg

SEQ ID NO: 808141 - RNA, 20 nt, Artificial Sequence
  Synthetic
aggaaaaagagccaggaugg

SEQ ID NO: 808142 - RNA, 20 nt, Artificial Sequence
  Synthetic
uaauaucagugccaggaugg

SEQ ID NO: 808143 - RNA, 20 nt, Artificial Sequence
  Synthetic
acuucccacaaggaggaugg

SEQ ID NO: 808144 - RNA, 20 nt, Artificial Sequence
  Synthetic
caaauccagagauaggaugg

SEQ ID NO: 808145 - RNA, 20 nt, Artificial Sequence
  Synthetic
agggaaagggaaagggaugg

SEQ ID NO: 808146 - RNA, 20 nt, Artificial Sequence
  Synthetic
aggaaauggaagagggaugg

SEQ ID NO: 808147 - RNA, 20 nt, Artificial Sequence
  Synthetic
cggggccucucaggggaugg

SEQ ID NO: 808148 - RNA, 20 nt, Artificial Sequence
  Synthetic
aacaauuuagcuggggaugg

SEQ ID NO: 808149 - RNA, 20 nt, Artificial Sequence
  Synthetic
agucauagaguuggggaugg

SEQ ID NO: 808150 - RNA, 20 nt, Artificial Sequence
  Synthetic
agugucauucacugggaugg

SEQ ID NO: 808151 - RNA, 20 nt, Artificial Sequence
  Synthetic
agggcgagagggugggaugg

SEQ ID NO: 808152 - RNA, 20 nt, Artificial Sequence
  Synthetic
agaguucuggagauggaugg

SEQ ID NO: 808153 - RNA, 20 nt, Artificial Sequence
  Synthetic
uggaaaagaucgauggaugg

SEQ ID NO: 808154 - RNA, 20 nt, Artificial Sequence
  Synthetic
cauaagaacucucuggaugg

SEQ ID NO: 808155 - RNA, 20 nt, Artificial Sequence
  Synthetic
uuauucaacuaaguggaugg

SEQ ID NO: 808156 - RNA, 20 nt, Artificial Sequence
  Synthetic
uaacuugaauaguuggaugg

SEQ ID NO: 808157 - RNA, 20 nt, Artificial Sequence
  Synthetic
ugggaaugucuuuuggaugg

SEQ ID NO: 808158 - RNA, 20 nt, Artificial Sequence
  Synthetic
aaucacugaguaaaugaugg

SEQ ID NO: 808159 - RNA, 20 nt, Artificial Sequence
  Synthetic
aaauuagcugggcaugaugg

SEQ ID NO: 808160 - RNA, 20 nt, Artificial Sequence
  Synthetic
uucugggguuuggaugaugg

SEQ ID NO: 808161 - RNA, 20 nt, Artificial Sequence
  Synthetic
augauuuucuuugaugaugg

SEQ ID NO: 808162 - RNA, 20 nt, Artificial Sequence
  Synthetic
ugagguaaauguuaugaugg

SEQ ID NO: 808163 - RNA, 20 nt, Artificial Sequence
  Synthetic
cuuaaucuuuuugcugaugg

SEQ ID NO: 808164 - RNA, 20 nt, Artificial Sequence
  Synthetic
auacaaauggaaucugaugg

SEQ ID NO: 808165 - RNA, 20 nt, Artificial Sequence
  Synthetic
agugaucauggcucugaugg

SEQ ID NO: 808166 - RNA, 20 nt, Artificial Sequence
  Synthetic
ucccuaggagauucugaugg

SEQ ID NO: 808167 - RNA, 20 nt, Artificial Sequence
  Synthetic
aaauuagccaggcgugaugg

SEQ ID NO: 808168 - RNA, 20 nt, Artificial Sequence
  Synthetic
aguuuuucaacauuugaugg

SEQ ID NO: 808169 - RNA, 20 nt, Artificial Sequence
  Synthetic
agcaauuauuacuuugaugg

SEQ ID NO: 808170 - RNA, 20 nt, Artificial Sequence
  Synthetic
uugagacucaauaaauaugg

SEQ ID NO: 808171 - RNA, 20 nt, Artificial Sequence
  Synthetic
ucaggacaaaggcaauaugg

SEQ ID NO: 808172 - RNA, 20 nt, Artificial Sequence
  Synthetic
aacuguacaaagacauaugg

SEQ ID NO: 808173 - RNA, 20 nt, Artificial Sequence
  Synthetic
caguaguggcugacauaugg

SEQ ID NO: 808174 - RNA, 20 nt, Artificial Sequence
  Synthetic
ucacauccuucuucauaugg

SEQ ID NO: 808175 - RNA, 20 nt, Artificial Sequence
  Synthetic
uuuuaaaggagcagauaugg

SEQ ID NO: 808176 - RNA, 20 nt, Artificial Sequence
  Synthetic
agaauucuuucaauauaugg

SEQ ID NO: 808177 - RNA, 20 nt, Artificial Sequence
  Synthetic
ccuuccccaaggguauaugg

SEQ ID NO: 808178 - RNA, 20 nt, Artificial Sequence
  Synthetic
uaacaguuguauguauaugg

SEQ ID NO: 808179 - RNA, 20 nt, Artificial Sequence
  Synthetic
agcuguauaucuguauaugg

SEQ ID NO: 808180 - RNA, 20 nt, Artificial Sequence
  Synthetic
uucugucugcuuaacuaugg

SEQ ID NO: 808181 - RNA, 20 nt, Artificial Sequence
  Synthetic
cagcuccuucauuccuaugg

SEQ ID NO: 808182 - RNA, 20 nt, Artificial Sequence
  Synthetic
aauacacagcugggcuaugg

SEQ ID NO: 808183 - RNA, 20 nt, Artificial Sequence
  Synthetic
aauaaauuaauaugcuaugg

SEQ ID NO: 808184 - RNA, 20 nt, Artificial Sequence
  Synthetic
uagguauacacgugcuaugg

SEQ ID NO: 808185 - RNA, 20 nt, Artificial Sequence
  Synthetic
agaaagaacaaaaucuaugg

SEQ ID NO: 808186 - RNA, 20 nt, Artificial Sequence
  Synthetic
aauugaaucagaaucuaugg

SEQ ID NO: 808187 - RNA, 20 nt, Artificial Sequence
  Synthetic
auugggaaacagcucuaugg

SEQ ID NO: 808188 - RNA, 20 nt, Artificial Sequence
  Synthetic
uuaucaggagaacaguaugg

SEQ ID NO: 808189 - RNA, 20 nt, Artificial Sequence
  Synthetic
cccucaagguuccaguaugg

SEQ ID NO: 808190 - RNA, 20 nt, Artificial Sequence
  Synthetic
auccuguauuuucaguaugg

SEQ ID NO: 808191 - RNA, 20 nt, Artificial Sequence
  Synthetic
aauuucaaacaugaguaugg

SEQ ID NO: 808192 - RNA, 20 nt, Artificial Sequence
  Synthetic
cugguagaauaguaguaugg

SEQ ID NO: 808193 - RNA, 20 nt, Artificial Sequence
  Synthetic
cauuauggaggacgguaugg

SEQ ID NO: 808194 - RNA, 20 nt, Artificial Sequence
  Synthetic
auugauaguaguggguaugg

SEQ ID NO: 808195 - RNA, 20 nt, Artificial Sequence
  Synthetic
auacagacuuuuauguaugg

SEQ ID NO: 808196 - RNA, 20 nt, Artificial Sequence
  Synthetic
caucucccuggcuuguaugg

SEQ ID NO: 808197 - RNA, 20 nt, Artificial Sequence
  Synthetic
acuuaaaggcguuuguaugg

SEQ ID NO: 808198 - RNA, 20 nt, Artificial Sequence
  Synthetic
auuggcucaugcaauuaugg

SEQ ID NO: 808199 - RNA, 20 nt, Artificial Sequence
  Synthetic
uauuucuuucucaauuaugg

SEQ ID NO: 808200 - RNA, 20 nt, Artificial Sequence
  Synthetic
agauuuuauuguaauuaugg

SEQ ID NO: 808201 - RNA, 20 nt, Artificial Sequence
  Synthetic
aaugaguacauccauuaugg

SEQ ID NO: 808202 - RNA, 20 nt, Artificial Sequence
  Synthetic
uugacacguggggauuaugg

SEQ ID NO: 808203 - RNA, 20 nt, Artificial Sequence
  Synthetic
accucacuuccauauuaugg

SEQ ID NO: 808204 - RNA, 20 nt, Artificial Sequence
  Synthetic
agaaauggagaguauuaugg

SEQ ID NO: 808205 - RNA, 20 nt, Artificial Sequence
  Synthetic
ugugacucacuuuauuaugg

SEQ ID NO: 808206 - RNA, 20 nt, Artificial Sequence
  Synthetic
uagggaaccaugucuuaugg

SEQ ID NO: 808207 - RNA, 20 nt, Artificial Sequence
  Synthetic
aaaagaaaaaaguguuaugg

SEQ ID NO: 808208 - RNA, 20 nt, Artificial Sequence
  Synthetic
cccugauauguaauuuaugg

SEQ ID NO: 808209 - RNA, 20 nt, Artificial Sequence
  Synthetic
agcaacaugcaugcaacugg

SEQ ID NO: 808210 - RNA, 20 nt, Artificial Sequence
  Synthetic
aguuccagccccagaacugg

SEQ ID NO: 808211 - RNA, 20 nt, Artificial Sequence
  Synthetic
aggaaaagugggagaacugg

SEQ ID NO: 808212 - RNA, 20 nt, Artificial Sequence
  Synthetic
agcaacguggauagaacugg

SEQ ID NO: 808213 - RNA, 20 nt, Artificial Sequence
  Synthetic
cuuggugagaaaggaacugg

SEQ ID NO: 808214 - RNA, 20 nt, Artificial Sequence
  Synthetic
uuaggggaagaaggaacugg

SEQ ID NO: 808215 - RNA, 20 nt, Artificial Sequence
  Synthetic
uccuugaacccaggaacugg

SEQ ID NO: 808216 - RNA, 20 nt, Artificial Sequence
  Synthetic
agcaacauggauggaacugg

SEQ ID NO: 808217 - RNA, 20 nt, Artificial Sequence
  Synthetic
aacaucauggauggaacugg

SEQ ID NO: 808218 - RNA, 20 nt, Artificial Sequence
  Synthetic
aacaucuuggauggaacugg

SEQ ID NO: 808219 - RNA, 20 nt, Artificial Sequence
  Synthetic
aauugagaggguugaacugg

SEQ ID NO: 808220 - RNA, 20 nt, Artificial Sequence
  Synthetic
cuucugucugcauuaacugg

SEQ ID NO: 808221 - RNA, 20 nt, Artificial Sequence
  Synthetic
acuaguaaucccaacacugg

SEQ ID NO: 808222 - RNA, 20 nt, Artificial Sequence
  Synthetic
uguagucccagacacacugg

SEQ ID NO: 808223 - RNA, 20 nt, Artificial Sequence
  Synthetic
uucauucaauccaccacugg

SEQ ID NO: 808224 - RNA, 20 nt, Artificial Sequence
  Synthetic
aguuggauuggagccacugg

SEQ ID NO: 808225 - RNA, 20 nt, Artificial Sequence
  Synthetic
uccgagagcuaugccacugg

SEQ ID NO: 808226 - RNA, 20 nt, Artificial Sequence
  Synthetic
uaaccuugcuuaugcacugg

SEQ ID NO: 808227 - RNA, 20 nt, Artificial Sequence
  Synthetic
uuuauccagucuaucacugg

SEQ ID NO: 808228 - RNA, 20 nt, Artificial Sequence
  Synthetic
ugcucucaacuccucacugg

SEQ ID NO: 808229 - RNA, 20 nt, Artificial Sequence
  Synthetic
agaucuggcuauuucacugg

SEQ ID NO: 808230 - RNA, 20 nt, Artificial Sequence
  Synthetic
cacgaucuggaacagacugg

SEQ ID NO: 808231 - RNA, 20 nt, Artificial Sequence
  Synthetic
cgcuuuagcaaagagacugg

SEQ ID NO: 808232 - RNA, 20 nt, Artificial Sequence
  Synthetic
aaagagauguaagagacugg

SEQ ID NO: 808233 - RNA, 20 nt, Artificial Sequence
  Synthetic
augaaaguugaaaggacugg

SEQ ID NO: 808234 - RNA, 20 nt, Artificial Sequence
  Synthetic
aagcugggaguggggacugg

SEQ ID NO: 808235 - RNA, 20 nt, Artificial Sequence
  Synthetic
ccaagacuuagauggacugg

SEQ ID NO: 808236 - RNA, 20 nt, Artificial Sequence
  Synthetic
aaaaucaaagacuggacugg

SEQ ID NO: 808237 - RNA, 20 nt, Artificial Sequence
  Synthetic
acauaacuacuaaauacugg

SEQ ID NO: 808238 - RNA, 20 nt, Artificial Sequence
  Synthetic
cacacacuggggccuacugg

SEQ ID NO: 808239 - RNA, 20 nt, Artificial Sequence
  Synthetic
agggacaguacagcuacugg

SEQ ID NO: 808240 - RNA, 20 nt, Artificial Sequence
  Synthetic
uggaauuuucacauuacugg

SEQ ID NO: 808241 - RNA, 20 nt, Artificial Sequence
  Synthetic
aauuugcuuuagauuacugg

SEQ ID NO: 808242 - RNA, 20 nt, Artificial Sequence
  Synthetic
agugaaaugaaacuuacugg

SEQ ID NO: 808243 - RNA, 20 nt, Artificial Sequence
  Synthetic
aucuggaaaggucuuacugg

SEQ ID NO: 808244 - RNA, 20 nt, Artificial Sequence
  Synthetic
uugucuguuucaguuacugg

SEQ ID NO: 808245 - RNA, 20 nt, Artificial Sequence
  Synthetic
ccacccaaaucuguuacugg

SEQ ID NO: 808246 - RNA, 20 nt, Artificial Sequence
  Synthetic
uuuauuauuguuguuacugg

SEQ ID NO: 808247 - RNA, 20 nt, Artificial Sequence
  Synthetic
uagaagaggacauuuacugg

SEQ ID NO: 808248 - RNA, 20 nt, Artificial Sequence
  Synthetic
caucaaaguuuauuuacugg

SEQ ID NO: 808249 - RNA, 20 nt, Artificial Sequence
  Synthetic
augucuuuccuguuuacugg

SEQ ID NO: 808250 - RNA, 20 nt, Artificial Sequence
  Synthetic
uaaaagacauauuuuacugg

SEQ ID NO: 808251 - RNA, 20 nt, Artificial Sequence
  Synthetic
aucuuauacauauaaccugg

SEQ ID NO: 808252 - RNA, 20 nt, Artificial Sequence
  Synthetic
cauacaucagaaucaccugg

SEQ ID NO: 808253 - RNA, 20 nt, Artificial Sequence
  Synthetic
ugcagguaucuaagaccugg

SEQ ID NO: 808254 - RNA, 20 nt, Artificial Sequence
  Synthetic
acauuauuccacagaccugg

SEQ ID NO: 808255 - RNA, 20 nt, Artificial Sequence
  Synthetic
cccaacauggauggaccugg

SEQ ID NO: 808256 - RNA, 20 nt, Artificial Sequence
  Synthetic
aaguucaguugccacccugg

SEQ ID NO: 808257 - RNA, 20 nt, Artificial Sequence
  Synthetic
cccuaugaaaaagacccugg

SEQ ID NO: 808258 - RNA, 20 nt, Artificial Sequence
  Synthetic
uuuucccuuuguaccccugg

SEQ ID NO: 808259 - RNA, 20 nt, Artificial Sequence
  Synthetic
aagcacaugcauuccccugg

SEQ ID NO: 808260 - RNA, 20 nt, Artificial Sequence
  Synthetic
agaaauauuuuuuccccugg

SEQ ID NO: 808261 - RNA, 20 nt, Artificial Sequence
  Synthetic
cuugaaacccagggcccugg

SEQ ID NO: 808262 - RNA, 20 nt, Artificial Sequence
  Synthetic
aauauaagaguaugcccugg

SEQ ID NO: 808263 - RNA, 20 nt, Artificial Sequence
  Synthetic
caguuuugaacacucccugg

SEQ ID NO: 808264 - RNA, 20 nt, Artificial Sequence
  Synthetic
augaaauagacagagccugg

SEQ ID NO: 808265 - RNA, 20 nt, Artificial Sequence
  Synthetic
aauaauaaggaugagccugg

SEQ ID NO: 808266 - RNA, 20 nt, Artificial Sequence
  Synthetic
cucuuguaagccaggccugg

SEQ ID NO: 808267 - RNA, 20 nt, Artificial Sequence
  Synthetic
cucuuguaaggcaggccugg

SEQ ID NO: 808268 - RNA, 20 nt, Artificial Sequence
  Synthetic
cucuuuuagggcaggccugg

SEQ ID NO: 808269 - RNA, 20 nt, Artificial Sequence
  Synthetic
auguuggugguggggccugg

SEQ ID NO: 808270 - RNA, 20 nt, Artificial Sequence
  Synthetic
caaaaaucagcugggccugg

SEQ ID NO: 808271 - RNA, 20 nt, Artificial Sequence
  Synthetic
auguccuugcuugggccugg

SEQ ID NO: 808272 - RNA, 20 nt, Artificial Sequence
  Synthetic
ucucagaugaggaugccugg

SEQ ID NO: 808273 - RNA, 20 nt, Artificial Sequence
  Synthetic
aguacagacauagugccugg

SEQ ID NO: 808274 - RNA, 20 nt, Artificial Sequence
  Synthetic
ugacacuggaaugugccugg

SEQ ID NO: 808275 - RNA, 20 nt, Artificial Sequence
  Synthetic
auuugucuuucugugccugg

SEQ ID NO: 808276 - RNA, 20 nt, Artificial Sequence
  Synthetic
uaauccuaaaacaauccugg

SEQ ID NO: 808277 - RNA, 20 nt, Artificial Sequence
  Synthetic
uggugguuauuagauccugg

SEQ ID NO: 808278 - RNA, 20 nt, Artificial Sequence
  Synthetic
ugcuacccaaguuauccugg

SEQ ID NO: 808279 - RNA, 20 nt, Artificial Sequence
  Synthetic
acauuuacaaacacuccugg

SEQ ID NO: 808280 - RNA, 20 nt, Artificial Sequence
  Synthetic
agcccuuuaauggcuccugg

SEQ ID NO: 808281 - RNA, 20 nt, Artificial Sequence
  Synthetic
uucauguuuaacucuccugg

SEQ ID NO: 808282 - RNA, 20 nt, Artificial Sequence
  Synthetic
auagugagaaugucuccugg

SEQ ID NO: 808283 - RNA, 20 nt, Artificial Sequence
  Synthetic
uaucuguuaaggauuccugg

SEQ ID NO: 808284 - RNA, 20 nt, Artificial Sequence
  Synthetic
aaucaaauccauauuccugg

SEQ ID NO: 808285 - RNA, 20 nt, Artificial Sequence
  Synthetic
cucuuagcaacuauuccugg

SEQ ID NO: 808286 - RNA, 20 nt, Artificial Sequence
  Synthetic
uggcuuaaugcccuuccugg

SEQ ID NO: 808287 - RNA, 20 nt, Artificial Sequence
  Synthetic
auacuaauuuuucuuccugg

SEQ ID NO: 808288 - RNA, 20 nt, Artificial Sequence
  Synthetic
uaaaauauuaaaguuccugg

SEQ ID NO: 808289 - RNA, 20 nt, Artificial Sequence
  Synthetic
aaccaauggacaaaagcugg

SEQ ID NO: 808290 - RNA, 20 nt, Artificial Sequence
  Synthetic
agcaaaaagaacaaagcugg

SEQ ID NO: 808291 - RNA, 20 nt, Artificial Sequence
  Synthetic
agccaaaagaacaaagcugg

SEQ ID NO: 808292 - RNA, 20 nt, Artificial Sequence
  Synthetic
aguaaaaugaacaaagcugg

SEQ ID NO: 808293 - RNA, 20 nt, Artificial Sequence
  Synthetic
agcaagaauaacaaagcugg

SEQ ID NO: 808294 - RNA, 20 nt, Artificial Sequence
  Synthetic
aauggccagaaauaagcugg

SEQ ID NO: 808295 - RNA, 20 nt, Artificial Sequence
  Synthetic
auuuccuaauuauaagcugg

SEQ ID NO: 808296 - RNA, 20 nt, Artificial Sequence
  Synthetic
aaaggauuuccgccagcugg

SEQ ID NO: 808297 - RNA, 20 nt, Artificial Sequence
  Synthetic
auggcuuccccuccagcugg

SEQ ID NO: 808298 - RNA, 20 nt, Artificial Sequence
  Synthetic
aguuaauucugagcagcugg

SEQ ID NO: 808299 - RNA, 20 nt, Artificial Sequence
  Synthetic
agcaacauggaugcagcugg

SEQ ID NO: 808300 - RNA, 20 nt, Artificial Sequence
  Synthetic
aggaacauggaugcagcugg

SEQ ID NO: 808301 - RNA, 20 nt, Artificial Sequence
  Synthetic
cucacaucagaaucagcugg

SEQ ID NO: 808302 - RNA, 20 nt, Artificial Sequence
  Synthetic
cucacgucagaaucagcugg

SEQ ID NO: 808303 - RNA, 20 nt, Artificial Sequence
  Synthetic
uuuucuugucuuucagcugg

SEQ ID NO: 808304 - RNA, 20 nt, Artificial Sequence
  Synthetic
aaguuaaguggcagagcugg

SEQ ID NO: 808305 - RNA, 20 nt, Artificial Sequence
  Synthetic
aggauguuaccaggagcugg

SEQ ID NO: 808306 - RNA, 20 nt, Artificial Sequence
  Synthetic
cuuaaaaaaccgggagcugg

SEQ ID NO: 808307 - RNA, 20 nt, Artificial Sequence
  Synthetic
aggcugccucugggagcugg

SEQ ID NO: 808308 - RNA, 20 nt, Artificial Sequence
  Synthetic
agcaacauggauggagcugg

SEQ ID NO: 808309 - RNA, 20 nt, Artificial Sequence
  Synthetic
uauucauauaaguuagcugg

SEQ ID NO: 808310 - RNA, 20 nt, Artificial Sequence
  Synthetic
uagagauauaaguuagcugg

SEQ ID NO: 808311 - RNA, 20 nt, Artificial Sequence
  Synthetic
aguaaacuuggaaaggcugg

SEQ ID NO: 808312 - RNA, 20 nt, Artificial Sequence
  Synthetic
ugcucuguugcccaggcugg

SEQ ID NO: 808313 - RNA, 20 nt, Artificial Sequence
  Synthetic
cuuaaccagaaugaggcugg

SEQ ID NO: 808314 - RNA, 20 nt, Artificial Sequence
  Synthetic
ccagcagguggaagggcugg

SEQ ID NO: 808315 - RNA, 20 nt, Artificial Sequence
  Synthetic
uggugguugcuaagggcugg

SEQ ID NO: 808316 - RNA, 20 nt, Artificial Sequence
  Synthetic
uggaugaaggguagggcugg

SEQ ID NO: 808317 - RNA, 20 nt, Artificial Sequence
  Synthetic
uuuuaaggauaaggggcugg

SEQ ID NO: 808318 - RNA, 20 nt, Artificial Sequence
  Synthetic
uggugguuuccaggggcugg

SEQ ID NO: 808319 - RNA, 20 nt, Artificial Sequence
  Synthetic
agaagaaugagcugggcugg

SEQ ID NO: 808320 - RNA, 20 nt, Artificial Sequence
  Synthetic
acuuccuuauuuauggcugg

SEQ ID NO: 808321 - RNA, 20 nt, Artificial Sequence
  Synthetic
ugcucugucauucuggcugg

SEQ ID NO: 808322 - RNA, 20 nt, Artificial Sequence
  Synthetic
agacucuucuacguggcugg

SEQ ID NO: 808323 - RNA, 20 nt, Artificial Sequence
  Synthetic
auuuuaaucaacaaugcugg

SEQ ID NO: 808324 - RNA, 20 nt, Artificial Sequence
  Synthetic
agcucaagugguaaugcugg

SEQ ID NO: 808325 - RNA, 20 nt, Artificial Sequence
  Synthetic
acacaaaagauuaaugcugg

SEQ ID NO: 808326 - RNA, 20 nt, Artificial Sequence
  Synthetic
aguugaaaaagagaugcugg

SEQ ID NO: 808327 - RNA, 20 nt, Artificial Sequence
  Synthetic
uauucaaaauaauaugcugg

SEQ ID NO: 808328 - RNA, 20 nt, Artificial Sequence
  Synthetic
caugucugaauauaugcugg

SEQ ID NO: 808329 - RNA, 20 nt, Artificial Sequence
  Synthetic
aacacuuaacacacugcugg

SEQ ID NO: 808330 - RNA, 20 nt, Artificial Sequence
  Synthetic
uuggagauguagacugcugg

SEQ ID NO: 808331 - RNA, 20 nt, Artificial Sequence
  Synthetic
auugauuuaaauacugcugg

SEQ ID NO: 808332 - RNA, 20 nt, Artificial Sequence
  Synthetic
cugccacuucuugcugcugg

SEQ ID NO: 808333 - RNA, 20 nt, Artificial Sequence
  Synthetic
uucagaagagauggugcugg

SEQ ID NO: 808334 - RNA, 20 nt, Artificial Sequence
  Synthetic
uuuggucacagaauugcugg

SEQ ID NO: 808335 - RNA, 20 nt, Artificial Sequence
  Synthetic
cuuuuagcugcuauugcugg

SEQ ID NO: 808336 - RNA, 20 nt, Artificial Sequence
  Synthetic
aggcccuuugcccuugcugg

SEQ ID NO: 808337 - RNA, 20 nt, Artificial Sequence
  Synthetic
auacaguaugauguugcugg

SEQ ID NO: 808338 - RNA, 20 nt, Artificial Sequence
  Synthetic
uugcagugaaguguugcugg

SEQ ID NO: 808339 - RNA, 20 nt, Artificial Sequence
  Synthetic
cagcacacacaaaaaucugg

SEQ ID NO: 808340 - RNA, 20 nt, Artificial Sequence
  Synthetic
agguucuuggguaaaucugg

SEQ ID NO: 808341 - RNA, 20 nt, Artificial Sequence
  Synthetic
aguaacccagaugaaucugg

SEQ ID NO: 808342 - RNA, 20 nt, Artificial Sequence
  Synthetic
agcuagauggucccaucugg

SEQ ID NO: 808343 - RNA, 20 nt, Artificial Sequence
  Synthetic
ugcuaucacccuccaucugg

SEQ ID NO: 808344 - RNA, 20 nt, Artificial Sequence
  Synthetic
agaugauuuagggcaucugg

SEQ ID NO: 808345 - RNA, 20 nt, Artificial Sequence
  Synthetic
cagaagaacuaugcaucugg

SEQ ID NO: 808346 - RNA, 20 nt, Artificial Sequence
  Synthetic
uguuuuuuuuuuucaucugg

SEQ ID NO: 808347 - RNA, 20 nt, Artificial Sequence
  Synthetic
auuacuaauaaaagaucugg

SEQ ID NO: 808348 - RNA, 20 nt, Artificial Sequence
  Synthetic
agggacauagauggaucugg

SEQ ID NO: 808349 - RNA, 20 nt, Artificial Sequence
  Synthetic
uauaguuuuaaaauaucugg

SEQ ID NO: 808350 - RNA, 20 nt, Artificial Sequence
  Synthetic
cugagaauuuacuuaucugg

SEQ ID NO: 808351 - RNA, 20 nt, Artificial Sequence
  Synthetic
uguaaucccagcaacucugg

SEQ ID NO: 808352 - RNA, 20 nt, Artificial Sequence
  Synthetic
accacuucacucaacucugg

SEQ ID NO: 808353 - RNA, 20 nt, Artificial Sequence
  Synthetic
uguaaucccagccacucugg

SEQ ID NO: 808354 - RNA, 20 nt, Artificial Sequence
  Synthetic
uguagucccagcuacucugg

SEQ ID NO: 808355 - RNA, 20 nt, Artificial Sequence
  Synthetic
uguaaucucagcuacucugg

SEQ ID NO: 808356 - RNA, 20 nt, Artificial Sequence
  Synthetic
uuuuggcugggcuacucugg

SEQ ID NO: 808357 - RNA, 20 nt, Artificial Sequence
  Synthetic
cauugccucccacccucugg

SEQ ID NO: 808358 - RNA, 20 nt, Artificial Sequence
  Synthetic
cacccgucuuuugccucugg

SEQ ID NO: 808359 - RNA, 20 nt, Artificial Sequence
  Synthetic
aauuuguuuggcuccucugg

SEQ ID NO: 808360 - RNA, 20 nt, Artificial Sequence
  Synthetic
augguuacuuuuggcucugg

SEQ ID NO: 808361 - RNA, 20 nt, Artificial Sequence
  Synthetic
uguagucccagcugcucugg

SEQ ID NO: 808362 - RNA, 20 nt, Artificial Sequence
  Synthetic
acagcuugaggaaucucugg

SEQ ID NO: 808363 - RNA, 20 nt, Artificial Sequence
  Synthetic
cuuuuauccacuaucucugg

SEQ ID NO: 808364 - RNA, 20 nt, Artificial Sequence
  Synthetic
uccuggucuacacucucugg

SEQ ID NO: 808365 - RNA, 20 nt, Artificial Sequence
  Synthetic
ccaugcuagugucucucugg

SEQ ID NO: 808366 - RNA, 20 nt, Artificial Sequence
  Synthetic
acuuaaauguaauucucugg

SEQ ID NO: 808367 - RNA, 20 nt, Artificial Sequence
  Synthetic
uuugcugguauauucucugg

SEQ ID NO: 808368 - RNA, 20 nt, Artificial Sequence
  Synthetic
ucuucagaagacuucucugg

SEQ ID NO: 808369 - RNA, 20 nt, Artificial Sequence
  Synthetic
uagaauuauagaaagucugg

SEQ ID NO: 808370 - RNA, 20 nt, Artificial Sequence
  Synthetic
auggagagagguaagucugg

SEQ ID NO: 808371 - RNA, 20 nt, Artificial Sequence
  Synthetic
cuguaggcagaacagucugg

SEQ ID NO: 808372 - RNA, 20 nt, Artificial Sequence
  Synthetic
uacaaagucauggagucugg

SEQ ID NO: 808373 - RNA, 20 nt, Artificial Sequence
  Synthetic
aguaguaaaugcuagucugg

SEQ ID NO: 808374 - RNA, 20 nt, Artificial Sequence
  Synthetic
cagaauuugaagucgucugg

SEQ ID NO: 808375 - RNA, 20 nt, Artificial Sequence
  Synthetic
ucuauucccaagaggucugg

SEQ ID NO: 808376 - RNA, 20 nt, Artificial Sequence
  Synthetic
ucuaccauuguggggucugg

SEQ ID NO: 808377 - RNA, 20 nt, Artificial Sequence
  Synthetic
uaauaaauauucaugucugg

SEQ ID NO: 808378 - RNA, 20 nt, Artificial Sequence
  Synthetic
ccugguccaggacugucugg

SEQ ID NO: 808379 - RNA, 20 nt, Artificial Sequence
  Synthetic
auguauaauugcaauucugg

SEQ ID NO: 808380 - RNA, 20 nt, Artificial Sequence
  Synthetic
caacauagaaaaacuucugg

SEQ ID NO: 808381 - RNA, 20 nt, Artificial Sequence
  Synthetic
uuccaauuugacacuucugg

SEQ ID NO: 808382 - RNA, 20 nt, Artificial Sequence
  Synthetic
ucauugucucagacuucugg

SEQ ID NO: 808383 - RNA, 20 nt, Artificial Sequence
  Synthetic
cucugcucaaaaucuucugg

SEQ ID NO: 808384 - RNA, 20 nt, Artificial Sequence
  Synthetic
cagaugcauaguucuucugg

SEQ ID NO: 808385 - RNA, 20 nt, Artificial Sequence
  Synthetic
cuuauuucucacaguucugg

SEQ ID NO: 808386 - RNA, 20 nt, Artificial Sequence
  Synthetic
cuguugucuuacaguucugg

SEQ ID NO: 808387 - RNA, 20 nt, Artificial Sequence
  Synthetic
aagagaaguugcaguucugg

SEQ ID NO: 808388 - RNA, 20 nt, Artificial Sequence
  Synthetic
uuguuggcucauaguucugg

SEQ ID NO: 808389 - RNA, 20 nt, Artificial Sequence
  Synthetic
uuuauugcuuauaguucugg

SEQ ID NO: 808390 - RNA, 20 nt, Artificial Sequence
  Synthetic
uacauauucauuaguucugg

SEQ ID NO: 808391 - RNA, 20 nt, Artificial Sequence
  Synthetic
uuuauuucucaccguucugg

SEQ ID NO: 808392 - RNA, 20 nt, Artificial Sequence
  Synthetic
cuuauuucucacuguucugg

SEQ ID NO: 808393 - RNA, 20 nt, Artificial Sequence
  Synthetic
uugauuacuguguguucugg

SEQ ID NO: 808394 - RNA, 20 nt, Artificial Sequence
  Synthetic
ugugcuauucaaauuucugg

SEQ ID NO: 808395 - RNA, 20 nt, Artificial Sequence
  Synthetic
aacuuaaucaguauuucugg

SEQ ID NO: 808396 - RNA, 20 nt, Artificial Sequence
  Synthetic
cuucuaucucuuauuucugg

SEQ ID NO: 808397 - RNA, 20 nt, Artificial Sequence
  Synthetic
cugugacuccaacuuucugg

SEQ ID NO: 808398 - RNA, 20 nt, Artificial Sequence
  Synthetic
agacaaaaguaaguuucugg

SEQ ID NO: 808399 - RNA, 20 nt, Artificial Sequence
  Synthetic
aauaguucaccaguuucugg

SEQ ID NO: 808400 - RNA, 20 nt, Artificial Sequence
  Synthetic
ucaaauucuuguuuuucugg

SEQ ID NO: 808401 - RNA, 20 nt, Artificial Sequence
  Synthetic
acagaugacauuuuuucugg

SEQ ID NO: 808402 - RNA, 20 nt, Artificial Sequence
  Synthetic
acaaccccaucaaaaagugg

SEQ ID NO: 808403 - RNA, 20 nt, Artificial Sequence
  Synthetic
ucuuugcuggggaaaagugg

SEQ ID NO: 808404 - RNA, 20 nt, Artificial Sequence
  Synthetic
uauuacaaagcucaaagugg

SEQ ID NO: 808405 - RNA, 20 nt, Artificial Sequence
  Synthetic
aaaucagugagagaaagugg

SEQ ID NO: 808406 - RNA, 20 nt, Artificial Sequence
  Synthetic
auugagaauugagaaagugg

SEQ ID NO: 808407 - RNA, 20 nt, Artificial Sequence
  Synthetic
uccuuguuuucauaaagugg

SEQ ID NO: 808408 - RNA, 20 nt, Artificial Sequence
  Synthetic
agaaaugaaggauaaagugg

SEQ ID NO: 808409 - RNA, 20 nt, Artificial Sequence
  Synthetic
uacuuuacaaaaacaagugg

SEQ ID NO: 808410 - RNA, 20 nt, Artificial Sequence
  Synthetic
cugacgcaguccagaagugg

SEQ ID NO: 808411 - RNA, 20 nt, Artificial Sequence
  Synthetic
agauuugacauaugaagugg

SEQ ID NO: 808412 - RNA, 20 nt, Artificial Sequence
  Synthetic
aaaaagaauuaaauaagugg

SEQ ID NO: 808413 - RNA, 20 nt, Artificial Sequence
  Synthetic
aggaguucuagauacagugg

SEQ ID NO: 808414 - RNA, 20 nt, Artificial Sequence
  Synthetic
cuuuaagugaacaccagugg

SEQ ID NO: 808415 - RNA, 20 nt, Artificial Sequence
  Synthetic
accuaggugcccaccagugg

SEQ ID NO: 808416 - RNA, 20 nt, Artificial Sequence
  Synthetic
cauguauguuauuccagugg

SEQ ID NO: 808417 - RNA, 20 nt, Artificial Sequence
  Synthetic
ccaugaagaccuuccagugg

SEQ ID NO: 808418 - RNA, 20 nt, Artificial Sequence
  Synthetic
uuaauauggagaagcagugg

SEQ ID NO: 808419 - RNA, 20 nt, Artificial Sequence
  Synthetic
uucaagaucucuggcagugg

SEQ ID NO: 808420 - RNA, 20 nt, Artificial Sequence
  Synthetic
cccaggcuggaaugcagugg

SEQ ID NO: 808421 - RNA, 20 nt, Artificial Sequence
  Synthetic
cuggaauuauccugcagugg

SEQ ID NO: 808422 - RNA, 20 nt, Artificial Sequence
  Synthetic
acaaacgcacagugcagugg

SEQ ID NO: 808423 - RNA, 20 nt, Artificial Sequence
  Synthetic
cccaggcuggagugcagugg

SEQ ID NO: 808424 - RNA, 20 nt, Artificial Sequence
  Synthetic
agugacaguguuugcagugg

SEQ ID NO: 808425 - RNA, 20 nt, Artificial Sequence
  Synthetic
auaggagaagacaagagugg

SEQ ID NO: 808426 - RNA, 20 nt, Artificial Sequence
  Synthetic
uacaagccagaagagagugg

SEQ ID NO: 808427 - RNA, 20 nt, Artificial Sequence
  Synthetic
aagagugugaaugagagugg

SEQ ID NO: 808428 - RNA, 20 nt, Artificial Sequence
  Synthetic
auuauguugaauacgagugg

SEQ ID NO: 808429 - RNA, 20 nt, Artificial Sequence
  Synthetic
acuguggggacaaggagugg

SEQ ID NO: 808430 - RNA, 20 nt, Artificial Sequence
  Synthetic
aaacaaacaaacaggagugg

SEQ ID NO: 808431 - RNA, 20 nt, Artificial Sequence
  Synthetic
caaaaaauagcuaggagugg

SEQ ID NO: 808432 - RNA, 20 nt, Artificial Sequence
  Synthetic
uagggaguggguaggagugg

SEQ ID NO: 808433 - RNA, 20 nt, Artificial Sequence
  Synthetic
agucauuagaaagggagugg

SEQ ID NO: 808434 - RNA, 20 nt, Artificial Sequence
  Synthetic
cuauuucuuuaagggagugg

SEQ ID NO: 808435 - RNA, 20 nt, Artificial Sequence
  Synthetic
aguucagggcuugggagugg

SEQ ID NO: 808436 - RNA, 20 nt, Artificial Sequence
  Synthetic
uucagacuaggguggagugg

SEQ ID NO: 808437 - RNA, 20 nt, Artificial Sequence
  Synthetic
uggugggcaggaaugagugg

SEQ ID NO: 808438 - RNA, 20 nt, Artificial Sequence
  Synthetic
aggcugucacaagugagugg

SEQ ID NO: 808439 - RNA, 20 nt, Artificial Sequence
  Synthetic
cugaggaauaaggugagugg

SEQ ID NO: 808440 - RNA, 20 nt, Artificial Sequence
  Synthetic
uccacuugagauuugagugg

SEQ ID NO: 808441 - RNA, 20 nt, Artificial Sequence
  Synthetic
cagcaaugcaauaauagugg

SEQ ID NO: 808442 - RNA, 20 nt, Artificial Sequence
  Synthetic
aaaagaggaauuaauagugg

SEQ ID NO: 808443 - RNA, 20 nt, Artificial Sequence
  Synthetic
aaaugaggagauucuagugg

SEQ ID NO: 808444 - RNA, 20 nt, Artificial Sequence
  Synthetic
uagccccgaaaugguagugg

SEQ ID NO: 808445 - RNA, 20 nt, Artificial Sequence
  Synthetic
ucugcacuucauauuagugg

SEQ ID NO: 808446 - RNA, 20 nt, Artificial Sequence
  Synthetic
aaaucaacugaacuuagugg

SEQ ID NO: 808447 - RNA, 20 nt, Artificial Sequence
  Synthetic
aucugaaagcuauuuagugg

SEQ ID NO: 808448 - RNA, 20 nt, Artificial Sequence
  Synthetic
uuugaucuguaguuuagugg

SEQ ID NO: 808449 - RNA, 20 nt, Artificial Sequence
  Synthetic
uggagcugaauguuuagugg

SEQ ID NO: 808450 - RNA, 20 nt, Artificial Sequence
  Synthetic
cuauguuuccauuuuagugg

SEQ ID NO: 808451 - RNA, 20 nt, Artificial Sequence
  Synthetic
uaauuagguuauuuuagugg

SEQ ID NO: 808452 - RNA, 20 nt, Artificial Sequence
  Synthetic
uguuaacaaagacaacgugg

SEQ ID NO: 808453 - RNA, 20 nt, Artificial Sequence
  Synthetic
aaaaaauuacccggacgugg

SEQ ID NO: 808454 - RNA, 20 nt, Artificial Sequence
  Synthetic
acagguuuggggggacgugg

SEQ ID NO: 808455 - RNA, 20 nt, Artificial Sequence
  Synthetic
agcacuuugggaggccgugg

SEQ ID NO: 808456 - RNA, 20 nt, Artificial Sequence
  Synthetic
uuagucauggccggccgugg

SEQ ID NO: 808457 - RNA, 20 nt, Artificial Sequence
  Synthetic
ugaagggaaauaauccgugg

SEQ ID NO: 808458 - RNA, 20 nt, Artificial Sequence
  Synthetic
uagguauacauguuccgugg

SEQ ID NO: 808459 - RNA, 20 nt, Artificial Sequence
  Synthetic
caaaaauuagcugagcgugg

SEQ ID NO: 808460 - RNA, 20 nt, Artificial Sequence
  Synthetic
aaucaauugaccaggcgugg

SEQ ID NO: 808461 - RNA, 20 nt, Artificial Sequence
  Synthetic
aaaaaauuagccaggcgugg

SEQ ID NO: 808462 - RNA, 20 nt, Artificial Sequence
  Synthetic
caaaaauuagccaggcgugg

SEQ ID NO: 808463 - RNA, 20 nt, Artificial Sequence
  Synthetic
acaaaauuagccaggcgugg

SEQ ID NO: 808464 - RNA, 20 nt, Artificial Sequence
  Synthetic
ugaaaauuagccaggcgugg

SEQ ID NO: 808465 - RNA, 20 nt, Artificial Sequence
  Synthetic
auaucaugggccaggcgugg

SEQ ID NO: 808466 - RNA, 20 nt, Artificial Sequence
  Synthetic
aaaaaauuagcagggcgugg

SEQ ID NO: 808467 - RNA, 20 nt, Artificial Sequence
  Synthetic
aaaaaauuagccgggcgugg

SEQ ID NO: 808468 - RNA, 20 nt, Artificial Sequence
  Synthetic
acaaaauuagccgggcgugg

SEQ ID NO: 808469 - RNA, 20 nt, Artificial Sequence
  Synthetic
ccauuuccggccgggcgugg

SEQ ID NO: 808470 - RNA, 20 nt, Artificial Sequence
  Synthetic
caaaaauuauucgggcgugg

SEQ ID NO: 808471 - RNA, 20 nt, Artificial Sequence
  Synthetic
caaaaaucagcugggcgugg

SEQ ID NO: 808472 - RNA, 20 nt, Artificial Sequence
  Synthetic
aaaaaauuagcugggcgugg

SEQ ID NO: 808473 - RNA, 20 nt, Artificial Sequence
  Synthetic
caaaaauuagcugggcgugg

SEQ ID NO: 808474 - RNA, 20 nt, Artificial Sequence
  Synthetic
cuuuauugggcugggcgugg

SEQ ID NO: 808475 - RNA, 20 nt, Artificial Sequence
  Synthetic
uaguccuuggcugggcgugg

SEQ ID NO: 808476 - RNA, 20 nt, Artificial Sequence
  Synthetic
cgagaaauaguugggcgugg

SEQ ID NO: 808477 - RNA, 20 nt, Artificial Sequence
  Synthetic
aaaaaauuagccaugcgugg

SEQ ID NO: 808478 - RNA, 20 nt, Artificial Sequence
  Synthetic
caaaaaugaccugugcgugg

SEQ ID NO: 808479 - RNA, 20 nt, Artificial Sequence
  Synthetic
cacacaaaagccuugcgugg

SEQ ID NO: 808480 - RNA, 20 nt, Artificial Sequence
  Synthetic
uagauuucuagaguucgugg

SEQ ID NO: 808481 - RNA, 20 nt, Artificial Sequence
  Synthetic
uguggcuguguucaaggugg

SEQ ID NO: 808482 - RNA, 20 nt, Artificial Sequence
  Synthetic
uacuugaaacuggaaggugg

SEQ ID NO: 808483 - RNA, 20 nt, Artificial Sequence
  Synthetic
agcuuaaaggaauaaggugg

SEQ ID NO: 808484 - RNA, 20 nt, Artificial Sequence
  Synthetic
cauuauuuuacauaaggugg

SEQ ID NO: 808485 - RNA, 20 nt, Artificial Sequence
  Synthetic
cugaugggaaauacaggugg

SEQ ID NO: 808486 - RNA, 20 nt, Artificial Sequence
  Synthetic
uugacacuagguacaggugg

SEQ ID NO: 808487 - RNA, 20 nt, Artificial Sequence
  Synthetic
aagggagagagaccaggugg

SEQ ID NO: 808488 - RNA, 20 nt, Artificial Sequence
  Synthetic
ucaagggagagaccaggugg

SEQ ID NO: 808489 - RNA, 20 nt, Artificial Sequence
  Synthetic
augucuccaccugcaggugg

SEQ ID NO: 808490 - RNA, 20 nt, Artificial Sequence
  Synthetic
ccucaaacuuuuucaggugg

SEQ ID NO: 808491 - RNA, 20 nt, Artificial Sequence
  Synthetic
cacuugaaacuaagaggugg

SEQ ID NO: 808492 - RNA, 20 nt, Artificial Sequence
  Synthetic
uauuauuauuuuagaggugg

SEQ ID NO: 808493 - RNA, 20 nt, Artificial Sequence
  Synthetic
acuuugggaggccgaggugg

SEQ ID NO: 808494 - RNA, 20 nt, Artificial Sequence
  Synthetic
cgaggccugucgcgaggugg

SEQ ID NO: 808495 - RNA, 20 nt, Artificial Sequence
  Synthetic
ucacucgaaacaggaggugg

SEQ ID NO: 808496 - RNA, 20 nt, Artificial Sequence
  Synthetic
cacuugaucacaggaggugg

SEQ ID NO: 808497 - RNA, 20 nt, Artificial Sequence
  Synthetic
cgcuugaacccaggaggugg

SEQ ID NO: 808498 - RNA, 20 nt, Artificial Sequence
  Synthetic
ugcuugaacccaggaggugg

SEQ ID NO: 808499 - RNA, 20 nt, Artificial Sequence
  Synthetic
cguuugaacccaggaggugg

SEQ ID NO: 808500 - RNA, 20 nt, Artificial Sequence
  Synthetic
cacccgagcccaggaggugg

SEQ ID NO: 808501 - RNA, 20 nt, Artificial Sequence
  Synthetic
ugcuugagcccaggaggugg

SEQ ID NO: 808502 - RNA, 20 nt, Artificial Sequence
  Synthetic
uaaguaggcugaggaggugg

SEQ ID NO: 808503 - RNA, 20 nt, Artificial Sequence
  Synthetic
cacuugaacccgggaggugg

SEQ ID NO: 808504 - RNA, 20 nt, Artificial Sequence
  Synthetic
cgcuugaacccgggaggugg

SEQ ID NO: 808505 - RNA, 20 nt, Artificial Sequence
  Synthetic
ugcuugaacccgggaggugg

SEQ ID NO: 808506 - RNA, 20 nt, Artificial Sequence
  Synthetic
cacuugaacucgggaggugg

SEQ ID NO: 808507 - RNA, 20 nt, Artificial Sequence
  Synthetic
cgcuugaaccugggaggugg

SEQ ID NO: 808508 - RNA, 20 nt, Artificial Sequence
  Synthetic
ugcuugaaccugggaggugg

SEQ ID NO: 808509 - RNA, 20 nt, Artificial Sequence
  Synthetic
uguuugaaccugggaggugg

SEQ ID NO: 808510 - RNA, 20 nt, Artificial Sequence
  Synthetic
auauguuuugugggaggugg

SEQ ID NO: 808511 - RNA, 20 nt, Artificial Sequence
  Synthetic
cacuugaacuugggaggugg

SEQ ID NO: 808512 - RNA, 20 nt, Artificial Sequence
  Synthetic
ugucccggggguggaggugg

SEQ ID NO: 808513 - RNA, 20 nt, Artificial Sequence
  Synthetic
uacucaagaggcugaggugg

SEQ ID NO: 808514 - RNA, 20 nt, Artificial Sequence
  Synthetic
uuuauuggccugugaggugg

SEQ ID NO: 808515 - RNA, 20 nt, Artificial Sequence
  Synthetic
uaaguaugugugugaggugg

SEQ ID NO: 808516 - RNA, 20 nt, Artificial Sequence
  Synthetic
uuauuucugaaaauaggugg

SEQ ID NO: 808517 - RNA, 20 nt, Artificial Sequence
  Synthetic
aaucgcuugaaccuaggugg

SEQ ID NO: 808518 - RNA, 20 nt, Artificial Sequence
  Synthetic
cuggagcagcaucuaggugg

SEQ ID NO: 808519 - RNA, 20 nt, Artificial Sequence
  Synthetic
aaauuagcugggcacggugg

SEQ ID NO: 808520 - RNA, 20 nt, Artificial Sequence
  Synthetic
auaugacuggagaagggugg

SEQ ID NO: 808521 - RNA, 20 nt, Artificial Sequence
  Synthetic
cugcugauugaucagggugg

SEQ ID NO: 808522 - RNA, 20 nt, Artificial Sequence
  Synthetic
uggggccuaucagagggugg

SEQ ID NO: 808523 - RNA, 20 nt, Artificial Sequence
  Synthetic
uuaucuuugggagagggugg

SEQ ID NO: 808524 - RNA, 20 nt, Artificial Sequence
  Synthetic
caggaucuacucuagggugg

SEQ ID NO: 808525 - RNA, 20 nt, Artificial Sequence
  Synthetic
agcuauucaugguagggugg

SEQ ID NO: 808526 - RNA, 20 nt, Artificial Sequence
  Synthetic
aggggaaaaaguuagggugg

SEQ ID NO: 808527 - RNA, 20 nt, Artificial Sequence
  Synthetic
aggggccuguuggcgggugg

SEQ ID NO: 808528 - RNA, 20 nt, Artificial Sequence
  Synthetic
auagucacauggaggggugg

SEQ ID NO: 808529 - RNA, 20 nt, Artificial Sequence
  Synthetic
agagccaugaugaggggugg

SEQ ID NO: 808530 - RNA, 20 nt, Artificial Sequence
  Synthetic
uuucagcacuuuaggggugg

SEQ ID NO: 808531 - RNA, 20 nt, Artificial Sequence
  Synthetic
uggggccugucagggggugg

SEQ ID NO: 808532 - RNA, 20 nt, Artificial Sequence
  Synthetic
auuguaugucccgggggugg

SEQ ID NO: 808533 - RNA, 20 nt, Artificial Sequence
  Synthetic
cuggugccuguugggggugg

SEQ ID NO: 808534 - RNA, 20 nt, Artificial Sequence
  Synthetic
uuagagaaucaguggggugg

SEQ ID NO: 808535 - RNA, 20 nt, Artificial Sequence
  Synthetic
cagggccugucguggggugg

SEQ ID NO: 808536 - RNA, 20 nt, Artificial Sequence
  Synthetic
uggggccugucguggggugg

SEQ ID NO: 808537 - RNA, 20 nt, Artificial Sequence
  Synthetic
uggggacugugguggggugg

SEQ ID NO: 808538 - RNA, 20 nt, Artificial Sequence
  Synthetic
uggggacugcuguggggugg

SEQ ID NO: 808539 - RNA, 20 nt, Artificial Sequence
  Synthetic
uggggccugcuguggggugg

SEQ ID NO: 808540 - RNA, 20 nt, Artificial Sequence
  Synthetic
ugggaacuguuguggggugg

SEQ ID NO: 808541 - RNA, 20 nt, Artificial Sequence
  Synthetic
uggggacuguuguggggugg

SEQ ID NO: 808542 - RNA, 20 nt, Artificial Sequence
  Synthetic
cggggccuguuguggggugg

SEQ ID NO: 808543 - RNA, 20 nt, Artificial Sequence
  Synthetic
aaucucuccuuuuggggugg

SEQ ID NO: 808544 - RNA, 20 nt, Artificial Sequence
  Synthetic
caugcucgcuaccugggugg

SEQ ID NO: 808545 - RNA, 20 nt, Artificial Sequence
  Synthetic
cauccuuuguuguugggugg

SEQ ID NO: 808546 - RNA, 20 nt, Artificial Sequence
  Synthetic
cauauaguaaaacauggugg

SEQ ID NO: 808547 - RNA, 20 nt, Artificial Sequence
  Synthetic
aaauuagccaggcauggugg

SEQ ID NO: 808548 - RNA, 20 nt, Artificial Sequence
  Synthetic
aaauuagcagggcauggugg

SEQ ID NO: 808549 - RNA, 20 nt, Artificial Sequence
  Synthetic
aaauuagccgggcauggugg

SEQ ID NO: 808550 - RNA, 20 nt, Artificial Sequence
  Synthetic
aaaauagcugggcauggugg

SEQ ID NO: 808551 - RNA, 20 nt, Artificial Sequence
  Synthetic
aaauuagcugggcauggugg

SEQ ID NO: 808552 - RNA, 20 nt, Artificial Sequence
  Synthetic
uggugccagaaagauggugg

SEQ ID NO: 808553 - RNA, 20 nt, Artificial Sequence
  Synthetic
uguauaucuguauauggugg

SEQ ID NO: 808554 - RNA, 20 nt, Artificial Sequence
  Synthetic
cugucugcauuaacuggugg

SEQ ID NO: 808555 - RNA, 20 nt, Artificial Sequence
  Synthetic
cccuuugcccuugcuggugg

SEQ ID NO: 808556 - RNA, 20 nt, Artificial Sequence
  Synthetic
aguucuagauacaguggugg

SEQ ID NO: 808557 - RNA, 20 nt, Artificial Sequence
  Synthetic
caaacaaacaggaguggugg

SEQ ID NO: 808558 - RNA, 20 nt, Artificial Sequence
  Synthetic
aaaauagcuaggaguggugg

SEQ ID NO: 808559 - RNA, 20 nt, Artificial Sequence
  Synthetic
ccccgaaaugguaguggugg

SEQ ID NO: 808560 - RNA, 20 nt, Artificial Sequence
  Synthetic
aaauuacccggacguggugg

SEQ ID NO: 808561 - RNA, 20 nt, Artificial Sequence
  Synthetic
aaauuagccaggcguggugg

SEQ ID NO: 808562 - RNA, 20 nt, Artificial Sequence
  Synthetic
aaauuagcagggcguggugg

SEQ ID NO: 808563 - RNA, 20 nt, Artificial Sequence
  Synthetic
aaauuagccgggcguggugg

SEQ ID NO: 808564 - RNA, 20 nt, Artificial Sequence
  Synthetic
aaauuagcugggcguggugg

SEQ ID NO: 808565 - RNA, 20 nt, Artificial Sequence
  Synthetic
aaauuagccaugcguggugg

SEQ ID NO: 808566 - RNA, 20 nt, Artificial Sequence
  Synthetic
cucuccuuuugggguggugg

SEQ ID NO: 808567 - RNA, 20 nt, Artificial Sequence
  Synthetic
uccuuuuggggugguggugg

SEQ ID NO: 808568 - RNA, 20 nt, Artificial Sequence
  Synthetic
uauauucugcuugguggugg

SEQ ID NO: 808569 - RNA, 20 nt, Artificial Sequence
  Synthetic
agagagagaguugguggugg

SEQ ID NO: 808570 - RNA, 20 nt, Artificial Sequence
  Synthetic
acauuagccagguguggugg

SEQ ID NO: 808571 - RNA, 20 nt, Artificial Sequence
  Synthetic
aaauuagccggguguggugg

SEQ ID NO: 808572 - RNA, 20 nt, Artificial Sequence
  Synthetic
aaauuagcuggguguggugg

SEQ ID NO: 808573 - RNA, 20 nt, Artificial Sequence
  Synthetic
aaauugauugauuguggugg

SEQ ID NO: 808574 - RNA, 20 nt, Artificial Sequence
  Synthetic
cugacaauacugauuggugg

SEQ ID NO: 808575 - RNA, 20 nt, Artificial Sequence
  Synthetic
auuuugugucaacuuggugg

SEQ ID NO: 808576 - RNA, 20 nt, Artificial Sequence
  Synthetic
aaauauauucugcuuggugg

SEQ ID NO: 808577 - RNA, 20 nt, Artificial Sequence
  Synthetic
cagagagagagaguuggugg

SEQ ID NO: 808578 - RNA, 20 nt, Artificial Sequence
  Synthetic
ucaagauuggggguuggugg

SEQ ID NO: 808579 - RNA, 20 nt, Artificial Sequence
  Synthetic
ucuggcaaguggguuggugg

SEQ ID NO: 808580 - RNA, 20 nt, Artificial Sequence
  Synthetic
auaauucccaauguuggugg

SEQ ID NO: 808581 - RNA, 20 nt, Artificial Sequence
  Synthetic
cauggcaaaaaaaaaugugg

SEQ ID NO: 808582 - RNA, 20 nt, Artificial Sequence
  Synthetic
cagugcugaagcaaaugugg

SEQ ID NO: 808583 - RNA, 20 nt, Artificial Sequence
  Synthetic
cuuggaauuaagaaaugugg

SEQ ID NO: 808584 - RNA, 20 nt, Artificial Sequence
  Synthetic
agcuuguaaagacaaugugg

SEQ ID NO: 808585 - RNA, 20 nt, Artificial Sequence
  Synthetic
uucaugagcaagcaaugugg

SEQ ID NO: 808586 - RNA, 20 nt, Artificial Sequence
  Synthetic
ccauacuggcagcaaugugg

SEQ ID NO: 808587 - RNA, 20 nt, Artificial Sequence
  Synthetic
agucugacaauuccaugugg

SEQ ID NO: 808588 - RNA, 20 nt, Artificial Sequence
  Synthetic
aauuuucaagggggaugugg

SEQ ID NO: 808589 - RNA, 20 nt, Artificial Sequence
  Synthetic
uucugugugaugggaugugg

SEQ ID NO: 808590 - RNA, 20 nt, Artificial Sequence
  Synthetic
uaaaaaauaguuggaugugg

SEQ ID NO: 808591 - RNA, 20 nt, Artificial Sequence
  Synthetic
ugaguguucuuaugaugugg

SEQ ID NO: 808592 - RNA, 20 nt, Artificial Sequence
  Synthetic
aaggaauauuacauaugugg

SEQ ID NO: 808593 - RNA, 20 nt, Artificial Sequence
  Synthetic
ucaaaggagaggcuaugugg

SEQ ID NO: 808594 - RNA, 20 nt, Artificial Sequence
  Synthetic
ccaguggggacucuaugugg

SEQ ID NO: 808595 - RNA, 20 nt, Artificial Sequence
  Synthetic
aagagagagggaguaugugg

SEQ ID NO: 808596 - RNA, 20 nt, Artificial Sequence
  Synthetic
agauuggucuuucacugugg

SEQ ID NO: 808597 - RNA, 20 nt, Artificial Sequence
  Synthetic
ucacacucuggggacugugg

SEQ ID NO: 808598 - RNA, 20 nt, Artificial Sequence
  Synthetic
uuucuucucuuauccugugg

SEQ ID NO: 808599 - RNA, 20 nt, Artificial Sequence
  Synthetic
cagcaaauucccagcugugg

SEQ ID NO: 808600 - RNA, 20 nt, Artificial Sequence
  Synthetic
ugaaaaugagccagcugugg

SEQ ID NO: 808601 - RNA, 20 nt, Artificial Sequence
  Synthetic
uuagauugaaaaggcugugg

SEQ ID NO: 808602 - RNA, 20 nt, Artificial Sequence
  Synthetic
cuauacauaauuugcugugg

SEQ ID NO: 808603 - RNA, 20 nt, Artificial Sequence
  Synthetic
cuagacaggcagaucugugg

SEQ ID NO: 808604 - RNA, 20 nt, Artificial Sequence
  Synthetic
cuaaaucagaaucucugugg

SEQ ID NO: 808605 - RNA, 20 nt, Artificial Sequence
  Synthetic
agcagcaucuccuucugugg

SEQ ID NO: 808606 - RNA, 20 nt, Artificial Sequence
  Synthetic
cauuggagacugaagugugg

SEQ ID NO: 808607 - RNA, 20 nt, Artificial Sequence
  Synthetic
aggauuucuuuucagugugg

SEQ ID NO: 808608 - RNA, 20 nt, Artificial Sequence
  Synthetic
uagggacuauuagagugugg

SEQ ID NO: 808609 - RNA, 20 nt, Artificial Sequence
  Synthetic
aucccucccaggacgugugg

SEQ ID NO: 808610 - RNA, 20 nt, Artificial Sequence
  Synthetic
uuuuaagagagaaggugugg

SEQ ID NO: 808611 - RNA, 20 nt, Artificial Sequence
  Synthetic
caaaaauuaaccaggugugg

SEQ ID NO: 808612 - RNA, 20 nt, Artificial Sequence
  Synthetic
caaacauucaccaggugugg

SEQ ID NO: 808613 - RNA, 20 nt, Artificial Sequence
  Synthetic
caaaaauuagccaggugugg

SEQ ID NO: 808614 - RNA, 20 nt, Artificial Sequence
  Synthetic
aaaacauuagccaggugugg

SEQ ID NO: 808615 - RNA, 20 nt, Artificial Sequence
  Synthetic
aaagaauaggccaggugugg

SEQ ID NO: 808616 - RNA, 20 nt, Artificial Sequence
  Synthetic
aaagagugggccaggugugg

SEQ ID NO: 808617 - RNA, 20 nt, Artificial Sequence
  Synthetic
uaaucaguggccaggugugg

SEQ ID NO: 808618 - RNA, 20 nt, Artificial Sequence
  Synthetic
aagguauuggccaggugugg

SEQ ID NO: 808619 - RNA, 20 nt, Artificial Sequence
  Synthetic
uauuaaaauaugaggugugg

SEQ ID NO: 808620 - RNA, 20 nt, Artificial Sequence
  Synthetic
aaaaaauuagcagggugugg

SEQ ID NO: 808621 - RNA, 20 nt, Artificial Sequence
  Synthetic
caaaaauuacccgggugugg

SEQ ID NO: 808622 - RNA, 20 nt, Artificial Sequence
  Synthetic
aaaaaauuagccgggugugg

SEQ ID NO: 808623 - RNA, 20 nt, Artificial Sequence
  Synthetic
caaaaauuagccgggugugg

SEQ ID NO: 808624 - RNA, 20 nt, Artificial Sequence
  Synthetic
agaaaacgggccgggugugg

SEQ ID NO: 808625 - RNA, 20 nt, Artificial Sequence
  Synthetic
caaaaauuaaucgggugugg

SEQ ID NO: 808626 - RNA, 20 nt, Artificial Sequence
  Synthetic
caaaaaguagcggggugugg

SEQ ID NO: 808627 - RNA, 20 nt, Artificial Sequence
  Synthetic
caaaaauuagcugggugugg

SEQ ID NO: 808628 - RNA, 20 nt, Artificial Sequence
  Synthetic
acaaaauuagcugggugugg

SEQ ID NO: 808629 - RNA, 20 nt, Artificial Sequence
  Synthetic
aaaaacuuagcugggugugg

SEQ ID NO: 808630 - RNA, 20 nt, Artificial Sequence
  Synthetic
ccuaauaaggcugggugugg

SEQ ID NO: 808631 - RNA, 20 nt, Artificial Sequence
  Synthetic
uaaaaauuaucugggugugg

SEQ ID NO: 808632 - RNA, 20 nt, Artificial Sequence
  Synthetic
auguuuaugagugggugugg

SEQ ID NO: 808633 - RNA, 20 nt, Artificial Sequence
  Synthetic
cacccaaugauugggugugg

SEQ ID NO: 808634 - RNA, 20 nt, Artificial Sequence
  Synthetic
caaaaauuaguugggugugg

SEQ ID NO: 808635 - RNA, 20 nt, Artificial Sequence
  Synthetic
aaaaaaauuagcuggugugg

SEQ ID NO: 808636 - RNA, 20 nt, Artificial Sequence
  Synthetic
auacugugggcuuggugugg

SEQ ID NO: 808637 - RNA, 20 nt, Artificial Sequence
  Synthetic
uagcauauaauaaugugugg

SEQ ID NO: 808638 - RNA, 20 nt, Artificial Sequence
  Synthetic
cagcucugggccaugugugg

SEQ ID NO: 808639 - RNA, 20 nt, Artificial Sequence
  Synthetic
uuugagagucaucugugugg

SEQ ID NO: 808640 - RNA, 20 nt, Artificial Sequence
  Synthetic
cucuuucugauucugugugg

SEQ ID NO: 808641 - RNA, 20 nt, Artificial Sequence
  Synthetic
auugcauacuaagugugugg

SEQ ID NO: 808642 - RNA, 20 nt, Artificial Sequence
  Synthetic
ugcucacuaccugugugugg

SEQ ID NO: 808643 - RNA, 20 nt, Artificial Sequence
  Synthetic
accauggugugugugugugg

SEQ ID NO: 808644 - RNA, 20 nt, Artificial Sequence
  Synthetic
caggguuggggguugugugg

SEQ ID NO: 808645 - RNA, 20 nt, Artificial Sequence
  Synthetic
aaucuaaaaaacaauugugg

SEQ ID NO: 808646 - RNA, 20 nt, Artificial Sequence
  Synthetic
aaggcccacccacauugugg

SEQ ID NO: 808647 - RNA, 20 nt, Artificial Sequence
  Synthetic
auucguguuuugcauugugg

SEQ ID NO: 808648 - RNA, 20 nt, Artificial Sequence
  Synthetic
uucugggaucaagauugugg

SEQ ID NO: 808649 - RNA, 20 nt, Artificial Sequence
  Synthetic
ugugaguguccagauugugg

SEQ ID NO: 808650 - RNA, 20 nt, Artificial Sequence
  Synthetic
auuaaauugauugauugugg

SEQ ID NO: 808651 - RNA, 20 nt, Artificial Sequence
  Synthetic
aaaaauacagggccuugugg

SEQ ID NO: 808652 - RNA, 20 nt, Artificial Sequence
  Synthetic
cacuuaggguuugcuugugg

SEQ ID NO: 808653 - RNA, 20 nt, Artificial Sequence
  Synthetic
uaguuuauggagucuugugg

SEQ ID NO: 808654 - RNA, 20 nt, Artificial Sequence
  Synthetic
aaaucagccggguguugugg

SEQ ID NO: 808655 - RNA, 20 nt, Artificial Sequence
  Synthetic
uguguguguguguguugugg

SEQ ID NO: 808656 - RNA, 20 nt, Artificial Sequence
  Synthetic
caaauacaucuuuguugugg

SEQ ID NO: 808657 - RNA, 20 nt, Artificial Sequence
  Synthetic
caaauaauucuuuguugugg

SEQ ID NO: 808658 - RNA, 20 nt, Artificial Sequence
  Synthetic
aacuucacauaacuuugugg

SEQ ID NO: 808659 - RNA, 20 nt, Artificial Sequence
  Synthetic
uccaacuggaauguuugugg

SEQ ID NO: 808660 - RNA, 20 nt, Artificial Sequence
  Synthetic
ucugaaagcuuuguuugugg

SEQ ID NO: 808661 - RNA, 20 nt, Artificial Sequence
  Synthetic
aaaagaaaaaaaaaaauugg

SEQ ID NO: 808662 - RNA, 20 nt, Artificial Sequence
  Synthetic
ucucuguauugaaaaauugg

SEQ ID NO: 808663 - RNA, 20 nt, Artificial Sequence
  Synthetic
uucaagucuggucaaauugg

SEQ ID NO: 808664 - RNA, 20 nt, Artificial Sequence
  Synthetic
auauauagaagugaaauugg

SEQ ID NO: 808665 - RNA, 20 nt, Artificial Sequence
  Synthetic
acacucaaggaauaaauugg

SEQ ID NO: 808666 - RNA, 20 nt, Artificial Sequence
  Synthetic
aacaacauggaugcaauugg

SEQ ID NO: 808667 - RNA, 20 nt, Artificial Sequence
  Synthetic
agagucuguagaucaauugg

SEQ ID NO: 808668 - RNA, 20 nt, Artificial Sequence
  Synthetic
uguaaaggcauuugaauugg

SEQ ID NO: 808669 - RNA, 20 nt, Artificial Sequence
  Synthetic
aaaacuuagugauuaauugg

SEQ ID NO: 808670 - RNA, 20 nt, Artificial Sequence
  Synthetic
uuagcuguugacuuaauugg

SEQ ID NO: 808671 - RNA, 20 nt, Artificial Sequence
  Synthetic
uagaaagagguaaacauugg

SEQ ID NO: 808672 - RNA, 20 nt, Artificial Sequence
  Synthetic
ugaaaaaagaacaacauugg

SEQ ID NO: 808673 - RNA, 20 nt, Artificial Sequence
  Synthetic
auucuugguugucacauugg

SEQ ID NO: 808674 - RNA, 20 nt, Artificial Sequence
  Synthetic
aacucauuguuuuacauugg

SEQ ID NO: 808675 - RNA, 20 nt, Artificial Sequence
  Synthetic
aagaaaacucuuaccauugg

SEQ ID NO: 808676 - RNA, 20 nt, Artificial Sequence
  Synthetic
cauaggaguaaagccauugg

SEQ ID NO: 808677 - RNA, 20 nt, Artificial Sequence
  Synthetic
caccuccaaauauccauugg

SEQ ID NO: 808678 - RNA, 20 nt, Artificial Sequence
  Synthetic
auucuucucaaguccauugg

SEQ ID NO: 808679 - RNA, 20 nt, Artificial Sequence
  Synthetic
agggggauggggagcauugg

SEQ ID NO: 808680 - RNA, 20 nt, Artificial Sequence
  Synthetic
acaaauaccuaaugcauugg

SEQ ID NO: 808681 - RNA, 20 nt, Artificial Sequence
  Synthetic
uaguguggaacaugcauugg

SEQ ID NO: 808682 - RNA, 20 nt, Artificial Sequence
  Synthetic
uaacacuuguauaucauugg

SEQ ID NO: 808683 - RNA, 20 nt, Artificial Sequence
  Synthetic
agaacaugucuucucauugg

SEQ ID NO: 808684 - RNA, 20 nt, Artificial Sequence
  Synthetic
auugguauggguuucauugg

SEQ ID NO: 808685 - RNA, 20 nt, Artificial Sequence
  Synthetic
auuccugcuuucaagauugg

SEQ ID NO: 808686 - RNA, 20 nt, Artificial Sequence
  Synthetic
uaauauaaccagaagauugg

SEQ ID NO: 808687 - RNA, 20 nt, Artificial Sequence
  Synthetic
ugguagggguagcagauugg

SEQ ID NO: 808688 - RNA, 20 nt, Artificial Sequence
  Synthetic
aagucagauuuagagauugg

SEQ ID NO: 808689 - RNA, 20 nt, Artificial Sequence
  Synthetic
uggggugggggugagauugg

SEQ ID NO: 808690 - RNA, 20 nt, Artificial Sequence
  Synthetic
cuaauuggagaguagauugg

SEQ ID NO: 808691 - RNA, 20 nt, Artificial Sequence
  Synthetic
cacaccaguugggggauugg

SEQ ID NO: 808692 - RNA, 20 nt, Artificial Sequence
  Synthetic
auuccauugaaugggauugg

SEQ ID NO: 808693 - RNA, 20 nt, Artificial Sequence
  Synthetic
cuggaggaugaauggauugg

SEQ ID NO: 808694 - RNA, 20 nt, Artificial Sequence
  Synthetic
uaaaauagaauuuggauugg

SEQ ID NO: 808695 - RNA, 20 nt, Artificial Sequence
  Synthetic
uaggagaguaaagugauugg

SEQ ID NO: 808696 - RNA, 20 nt, Artificial Sequence
  Synthetic
aauuugauccucaauauugg

SEQ ID NO: 808697 - RNA, 20 nt, Artificial Sequence
  Synthetic
ucgauugucauuucuauugg

SEQ ID NO: 808698 - RNA, 20 nt, Artificial Sequence
  Synthetic
uuaggaaagcacaguauugg

SEQ ID NO: 808699 - RNA, 20 nt, Artificial Sequence
  Synthetic
auacaaaugaucuguauugg

SEQ ID NO: 808700 - RNA, 20 nt, Artificial Sequence
  Synthetic
accuuaagauuaauuauugg

SEQ ID NO: 808701 - RNA, 20 nt, Artificial Sequence
  Synthetic
cuaucucccugacuuauugg

SEQ ID NO: 808702 - RNA, 20 nt, Artificial Sequence
  Synthetic
auuucucagaagcuuauugg

SEQ ID NO: 808703 - RNA, 20 nt, Artificial Sequence
  Synthetic
aaugagaugggaguuauugg

SEQ ID NO: 808704 - RNA, 20 nt, Artificial Sequence
  Synthetic
uaaaacacaaugguuauugg

SEQ ID NO: 808705 - RNA, 20 nt, Artificial Sequence
  Synthetic
uaugugguggugguuauugg

SEQ ID NO: 808706 - RNA, 20 nt, Artificial Sequence
  Synthetic
ugaauuuugugucaacuugg

SEQ ID NO: 808707 - RNA, 20 nt, Artificial Sequence
  Synthetic
uaugcauagaaauaacuugg

SEQ ID NO: 808708 - RNA, 20 nt, Artificial Sequence
  Synthetic
auugcuaaauguccacuugg

SEQ ID NO: 808709 - RNA, 20 nt, Artificial Sequence
  Synthetic
uguaaauuuuccagacuugg

SEQ ID NO: 808710 - RNA, 20 nt, Artificial Sequence
  Synthetic
aaugggcuuuggagacuugg

SEQ ID NO: 808711 - RNA, 20 nt, Artificial Sequence
  Synthetic
aggaccacaagcugacuugg

SEQ ID NO: 808712 - RNA, 20 nt, Artificial Sequence
  Synthetic
aggguacugguuauacuugg

SEQ ID NO: 808713 - RNA, 20 nt, Artificial Sequence
  Synthetic
agaacucaguaauuacuugg

SEQ ID NO: 808714 - RNA, 20 nt, Artificial Sequence
  Synthetic
cucuuagguucauuacuugg

SEQ ID NO: 808715 - RNA, 20 nt, Artificial Sequence
  Synthetic
ucagaacagguguuacuugg

SEQ ID NO: 808716 - RNA, 20 nt, Artificial Sequence
  Synthetic
agugaguuaucuuuacuugg

SEQ ID NO: 808717 - RNA, 20 nt, Artificial Sequence
  Synthetic
uuccuaacuaguaaccuugg

SEQ ID NO: 808718 - RNA, 20 nt, Artificial Sequence
  Synthetic
acagguuggugauaccuugg

SEQ ID NO: 808719 - RNA, 20 nt, Artificial Sequence
  Synthetic
caguuucacaugacccuugg

SEQ ID NO: 808720 - RNA, 20 nt, Artificial Sequence
  Synthetic
aucuccucacacagccuugg

SEQ ID NO: 808721 - RNA, 20 nt, Artificial Sequence
  Synthetic
ugcucauaugacugccuugg

SEQ ID NO: 808722 - RNA, 20 nt, Artificial Sequence
  Synthetic
uuuuucagaaacauccuugg

SEQ ID NO: 808723 - RNA, 20 nt, Artificial Sequence
  Synthetic
auuuaaauuuucuuccuugg

SEQ ID NO: 808724 - RNA, 20 nt, Artificial Sequence
  Synthetic
ucauuuggaauuuuccuugg

SEQ ID NO: 808725 - RNA, 20 nt, Artificial Sequence
  Synthetic
uuggcuuccccacagcuugg

SEQ ID NO: 808726 - RNA, 20 nt, Artificial Sequence
  Synthetic
caagaugucuuccagcuugg

SEQ ID NO: 808727 - RNA, 20 nt, Artificial Sequence
  Synthetic
caaaaauuagccaggcuugg

SEQ ID NO: 808728 - RNA, 20 nt, Artificial Sequence
  Synthetic
caaaaauuagccgggcuugg

SEQ ID NO: 808729 - RNA, 20 nt, Artificial Sequence
  Synthetic
acaaaauuagccgggcuugg

SEQ ID NO: 808730 - RNA, 20 nt, Artificial Sequence
  Synthetic
cuacaugcugauuggcuugg

SEQ ID NO: 808731 - RNA, 20 nt, Artificial Sequence
  Synthetic
auugagggaauucugcuugg

SEQ ID NO: 808732 - RNA, 20 nt, Artificial Sequence
  Synthetic
aagcaguuucuucugcuugg

SEQ ID NO: 808733 - RNA, 20 nt, Artificial Sequence
  Synthetic
cauacagucugcuugcuugg

SEQ ID NO: 808734 - RNA, 20 nt, Artificial Sequence
  Synthetic
uuuccagguuuuuugcuugg

SEQ ID NO: 808735 - RNA, 20 nt, Artificial Sequence
  Synthetic
auccaguaacaaaaucuugg

SEQ ID NO: 808736 - RNA, 20 nt, Artificial Sequence
  Synthetic
auggcaucugcaaaucuugg

SEQ ID NO: 808737 - RNA, 20 nt, Artificial Sequence
  Synthetic
uuuugguaacaucaucuugg

SEQ ID NO: 808738 - RNA, 20 nt, Artificial Sequence
  Synthetic
uguguugauacuuaucuugg

SEQ ID NO: 808739 - RNA, 20 nt, Artificial Sequence
  Synthetic
cuguaaucucagccucuugg

SEQ ID NO: 808740 - RNA, 20 nt, Artificial Sequence
  Synthetic
acuagacucuagggucuugg

SEQ ID NO: 808741 - RNA, 20 nt, Artificial Sequence
  Synthetic
uaugcccucuggauucuugg

SEQ ID NO: 808742 - RNA, 20 nt, Artificial Sequence
  Synthetic
aaauuaaaaaaacuucuugg

SEQ ID NO: 808743 - RNA, 20 nt, Artificial Sequence
  Synthetic
caauguauucuucuucuugg

SEQ ID NO: 808744 - RNA, 20 nt, Artificial Sequence
  Synthetic
cauagucccauauuucuugg

SEQ ID NO: 808745 - RNA, 20 nt, Artificial Sequence
  Synthetic
aaguuuucuuuguuucuugg

SEQ ID NO: 808746 - RNA, 20 nt, Artificial Sequence
  Synthetic
auuucaagccacaaaguugg

SEQ ID NO: 808747 - RNA, 20 nt, Artificial Sequence
  Synthetic
ucacauugaagucaaguugg

SEQ ID NO: 808748 - RNA, 20 nt, Artificial Sequence
  Synthetic
aggcaggcuaaagaaguugg

SEQ ID NO: 808749 - RNA, 20 nt, Artificial Sequence
  Synthetic
uguagcagagaggaaguugg

SEQ ID NO: 808750 - RNA, 20 nt, Artificial Sequence
  Synthetic
aauaaauuuaucuaaguugg

SEQ ID NO: 808751 - RNA, 20 nt, Artificial Sequence
  Synthetic
caugugagggacccaguugg

SEQ ID NO: 808752 - RNA, 20 nt, Artificial Sequence
  Synthetic
aagcagagagagagaguugg

SEQ ID NO: 808753 - RNA, 20 nt, Artificial Sequence
  Synthetic
aucaggaaaacaggaguugg

SEQ ID NO: 808754 - RNA, 20 nt, Artificial Sequence
  Synthetic
uucuugagcccaggaguugg

SEQ ID NO: 808755 - RNA, 20 nt, Artificial Sequence
  Synthetic
cuccugagccuaggaguugg

SEQ ID NO: 808756 - RNA, 20 nt, Artificial Sequence
  Synthetic
uucugcuuggugggaguugg

SEQ ID NO: 808757 - RNA, 20 nt, Artificial Sequence
  Synthetic
ugaagucugaauugaguugg

SEQ ID NO: 808758 - RNA, 20 nt, Artificial Sequence
  Synthetic
aacaguguggcaauaguugg

SEQ ID NO: 808759 - RNA, 20 nt, Artificial Sequence
  Synthetic
cuucuucacacaguaguugg

SEQ ID NO: 808760 - RNA, 20 nt, Artificial Sequence
  Synthetic
cuaaauuuagcauccguugg

SEQ ID NO: 808761 - RNA, 20 nt, Artificial Sequence
  Synthetic
agcuggcugggcuccguugg

SEQ ID NO: 808762 - RNA, 20 nt, Artificial Sequence
  Synthetic
ugucuuuuuagccgcguugg

SEQ ID NO: 808763 - RNA, 20 nt, Artificial Sequence
  Synthetic
aaauaauuggucaucguugg

SEQ ID NO: 808764 - RNA, 20 nt, Artificial Sequence
  Synthetic
acucaggaggcugagguugg

SEQ ID NO: 808765 - RNA, 20 nt, Artificial Sequence
  Synthetic
acuugggaggcugagguugg

SEQ ID NO: 808766 - RNA, 20 nt, Artificial Sequence
  Synthetic
aaaguagaaggugagguugg

SEQ ID NO: 808767 - RNA, 20 nt, Artificial Sequence
  Synthetic
cauugguguaguuagguugg

SEQ ID NO: 808768 - RNA, 20 nt, Artificial Sequence
  Synthetic
uuguaaguuggcaggguugg

SEQ ID NO: 808769 - RNA, 20 nt, Artificial Sequence
  Synthetic
aguuugaagcugaggguugg

SEQ ID NO: 808770 - RNA, 20 nt, Artificial Sequence
  Synthetic
uuuuccguggaccggguugg

SEQ ID NO: 808771 - RNA, 20 nt, Artificial Sequence
  Synthetic
cagaaaauaauagggguugg

SEQ ID NO: 808772 - RNA, 20 nt, Artificial Sequence
  Synthetic
caaauaugcugggggguugg

SEQ ID NO: 808773 - RNA, 20 nt, Artificial Sequence
  Synthetic
cuuucaagauuggggguugg

SEQ ID NO: 808774 - RNA, 20 nt, Artificial Sequence
  Synthetic
caaaaaguacaugggguugg

SEQ ID NO: 808775 - RNA, 20 nt, Artificial Sequence
  Synthetic
uuggagaugacugggguugg

SEQ ID NO: 808776 - RNA, 20 nt, Artificial Sequence
  Synthetic
auguaugugugugggguugg

SEQ ID NO: 808777 - RNA, 20 nt, Artificial Sequence
  Synthetic
cuguauaugguggugguugg

SEQ ID NO: 808778 - RNA, 20 nt, Artificial Sequence
  Synthetic
auuguaauccccaauguugg

SEQ ID NO: 808779 - RNA, 20 nt, Artificial Sequence
  Synthetic
aauauaauucccaauguugg

SEQ ID NO: 808780 - RNA, 20 nt, Artificial Sequence
  Synthetic
aaugugauuuccaauguugg

SEQ ID NO: 808781 - RNA, 20 nt, Artificial Sequence
  Synthetic
uuuccaagugaccauguugg

SEQ ID NO: 808782 - RNA, 20 nt, Artificial Sequence
  Synthetic
cauuuaaaaccagauguugg

SEQ ID NO: 808783 - RNA, 20 nt, Artificial Sequence
  Synthetic
acuuuagguguugauguugg

SEQ ID NO: 808784 - RNA, 20 nt, Artificial Sequence
  Synthetic
aaguauuuuguaacuguugg

SEQ ID NO: 808785 - RNA, 20 nt, Artificial Sequence
  Synthetic
uggccgcaggggccuguugg

SEQ ID NO: 808786 - RNA, 20 nt, Artificial Sequence
  Synthetic
uaaagaaagaugccuguugg

SEQ ID NO: 808787 - RNA, 20 nt, Artificial Sequence
  Synthetic
cacacacuggugccuguugg

SEQ ID NO: 808788 - RNA, 20 nt, Artificial Sequence
  Synthetic
cuccucaaauaagcuguugg

SEQ ID NO: 808789 - RNA, 20 nt, Artificial Sequence
  Synthetic
uacugaacccuggcuguugg

SEQ ID NO: 808790 - RNA, 20 nt, Artificial Sequence
  Synthetic
auuuaguaacuugcuguugg

SEQ ID NO: 808791 - RNA, 20 nt, Artificial Sequence
  Synthetic
aagaguuauaacaguguugg

SEQ ID NO: 808792 - RNA, 20 nt, Artificial Sequence
  Synthetic
aauguaauucccaguguugg

SEQ ID NO: 808793 - RNA, 20 nt, Artificial Sequence
  Synthetic
uauauuugcaaagguguugg

SEQ ID NO: 808794 - RNA, 20 nt, Artificial Sequence
  Synthetic
uacuauuguguguguguugg

SEQ ID NO: 808795 - RNA, 20 nt, Artificial Sequence
  Synthetic
aaacacuucugcauuguugg

SEQ ID NO: 808796 - RNA, 20 nt, Artificial Sequence
  Synthetic
uaacuacauuucauuguugg

SEQ ID NO: 808797 - RNA, 20 nt, Artificial Sequence
  Synthetic
aauggagugaauauuguugg

SEQ ID NO: 808798 - RNA, 20 nt, Artificial Sequence
  Synthetic
ucucacaaacauauuguugg

SEQ ID NO: 808799 - RNA, 20 nt, Artificial Sequence
  Synthetic
aaauauggccuccuuguugg

SEQ ID NO: 808800 - RNA, 20 nt, Artificial Sequence
  Synthetic
cuuucaaguuuaguuguugg

SEQ ID NO: 808801 - RNA, 20 nt, Artificial Sequence
  Synthetic
aaaagcugcaggguuguugg

SEQ ID NO: 808802 - RNA, 20 nt, Artificial Sequence
  Synthetic
cuuguuugagcaaaauuugg

SEQ ID NO: 808803 - RNA, 20 nt, Artificial Sequence
  Synthetic
uugcuauaacucaaauuugg

SEQ ID NO: 808804 - RNA, 20 nt, Artificial Sequence
  Synthetic
uuccaacacaugaaauuugg

SEQ ID NO: 808805 - RNA, 20 nt, Artificial Sequence
  Synthetic
agcuaaugucuagaauuugg

SEQ ID NO: 808806 - RNA, 20 nt, Artificial Sequence
  Synthetic
ccaauauagaaauaauuugg

SEQ ID NO: 808807 - RNA, 20 nt, Artificial Sequence
  Synthetic
aagauguucagauaauuugg

SEQ ID NO: 808808 - RNA, 20 nt, Artificial Sequence
  Synthetic
aauugguauuacuaauuugg

SEQ ID NO: 808809 - RNA, 20 nt, Artificial Sequence
  Synthetic
uuuaauagucuguaauuugg

SEQ ID NO: 808810 - RNA, 20 nt, Artificial Sequence
  Synthetic
caguauuauauuuaauuugg

SEQ ID NO: 808811 - RNA, 20 nt, Artificial Sequence
  Synthetic
ccagcuccugauacauuugg

SEQ ID NO: 808812 - RNA, 20 nt, Artificial Sequence
  Synthetic
uuuauggaucuuacauuugg

SEQ ID NO: 808813 - RNA, 20 nt, Artificial Sequence
  Synthetic
cuucuucaaaagccauuugg

SEQ ID NO: 808814 - RNA, 20 nt, Artificial Sequence
  Synthetic
cauuuuaauaguccauuugg

SEQ ID NO: 808815 - RNA, 20 nt, Artificial Sequence
  Synthetic
cauaguuccuuugcauuugg

SEQ ID NO: 808816 - RNA, 20 nt, Artificial Sequence
  Synthetic
auaggauuuauuucauuugg

SEQ ID NO: 808817 - RNA, 20 nt, Artificial Sequence
  Synthetic
uguauucugcuuucauuugg

SEQ ID NO: 808818 - RNA, 20 nt, Artificial Sequence
  Synthetic
aaaagaaggggcagauuugg

SEQ ID NO: 808819 - RNA, 20 nt, Artificial Sequence
  Synthetic
aauuucaacaugagauuugg

SEQ ID NO: 808820 - RNA, 20 nt, Artificial Sequence
  Synthetic
acugagacagugagauuugg

SEQ ID NO: 808821 - RNA, 20 nt, Artificial Sequence
  Synthetic
uguuugauauauagauuugg

SEQ ID NO: 808822 - RNA, 20 nt, Artificial Sequence
  Synthetic
aggucaaguuggggauuugg

SEQ ID NO: 808823 - RNA, 20 nt, Artificial Sequence
  Synthetic
aacccccaauggauauuugg

SEQ ID NO: 808824 - RNA, 20 nt, Artificial Sequence
  Synthetic
uugaucgaagauauauuugg

SEQ ID NO: 808825 - RNA, 20 nt, Artificial Sequence
  Synthetic
ccucccuugguacuauuugg

SEQ ID NO: 808826 - RNA, 20 nt, Artificial Sequence
  Synthetic
cucuuucauaucuuauuugg

SEQ ID NO: 808827 - RNA, 20 nt, Artificial Sequence
  Synthetic
agagcaagugauuuauuugg

SEQ ID NO: 808828 - RNA, 20 nt, Artificial Sequence
  Synthetic
uuggauaagagcaacuuugg

SEQ ID NO: 808829 - RNA, 20 nt, Artificial Sequence
  Synthetic
cuguaaucccaacacuuugg

SEQ ID NO: 808830 - RNA, 20 nt, Artificial Sequence
  Synthetic
uuuggugcauuucacuuugg

SEQ ID NO: 808831 - RNA, 20 nt, Artificial Sequence
  Synthetic
aauuguggggaugacuuugg

SEQ ID NO: 808832 - RNA, 20 nt, Artificial Sequence
  Synthetic
aauagucuuagcuacuuugg

SEQ ID NO: 808833 - RNA, 20 nt, Artificial Sequence
  Synthetic
cauuuucacuuuaccuuugg

SEQ ID NO: 808834 - RNA, 20 nt, Artificial Sequence
  Synthetic
ugguuuuagggacccuuugg

SEQ ID NO: 808835 - RNA, 20 nt, Artificial Sequence
  Synthetic
uugaaacucugaagcuuugg

SEQ ID NO: 808836 - RNA, 20 nt, Artificial Sequence
  Synthetic
ucugauugguuaaucuuugg

SEQ ID NO: 808837 - RNA, 20 nt, Artificial Sequence
  Synthetic
uaggauauggacaucuuugg

SEQ ID NO: 808838 - RNA, 20 nt, Artificial Sequence
  Synthetic
aagcugugguuuaucuuugg

SEQ ID NO: 808839 - RNA, 20 nt, Artificial Sequence
  Synthetic
caaaacuguuuuaucuuugg

SEQ ID NO: 808840 - RNA, 20 nt, Artificial Sequence
  Synthetic
accuccauucuacucuuugg

SEQ ID NO: 808841 - RNA, 20 nt, Artificial Sequence
  Synthetic
cuguaaucccagcucuuugg

SEQ ID NO: 808842 - RNA, 20 nt, Artificial Sequence
  Synthetic
acucugaggcuucucuuugg

SEQ ID NO: 808843 - RNA, 20 nt, Artificial Sequence
  Synthetic
uuuuaaacuugguucuuugg

SEQ ID NO: 808844 - RNA, 20 nt, Artificial Sequence
  Synthetic
auuguucaccuuuucuuugg

SEQ ID NO: 808845 - RNA, 20 nt, Artificial Sequence
  Synthetic
cugaaauguuaaaaguuugg

SEQ ID NO: 808846 - RNA, 20 nt, Artificial Sequence
  Synthetic
cacuauagagaacaguuugg

SEQ ID NO: 808847 - RNA, 20 nt, Artificial Sequence
  Synthetic
cacagguuggaacaguuugg

SEQ ID NO: 808848 - RNA, 20 nt, Artificial Sequence
  Synthetic
uggaauacaccacaguuugg

SEQ ID NO: 808849 - RNA, 20 nt, Artificial Sequence
  Synthetic
cagagucugguacaguuugg

SEQ ID NO: 808850 - RNA, 20 nt, Artificial Sequence
  Synthetic
caaaauggagaauaguuugg

SEQ ID NO: 808851 - RNA, 20 nt, Artificial Sequence
  Synthetic
cacuauggagaaccguuugg

SEQ ID NO: 808852 - RNA, 20 nt, Artificial Sequence
  Synthetic
acacagcagcacagguuugg

SEQ ID NO: 808853 - RNA, 20 nt, Artificial Sequence
  Synthetic
caaaaauuugccagguuugg

SEQ ID NO: 808854 - RNA, 20 nt, Artificial Sequence
  Synthetic
auuuguaaagugagguuugg

SEQ ID NO: 808855 - RNA, 20 nt, Artificial Sequence
  Synthetic
caaaaauuagccggguuugg

SEQ ID NO: 808856 - RNA, 20 nt, Artificial Sequence
  Synthetic
auuagaagguggggguuugg

SEQ ID NO: 808857 - RNA, 20 nt, Artificial Sequence
  Synthetic
ucuuguuggcuaugguuugg

SEQ ID NO: 808858 - RNA, 20 nt, Artificial Sequence
  Synthetic
cuucauguaaacugguuugg

SEQ ID NO: 808859 - RNA, 20 nt, Artificial Sequence
  Synthetic
aaugcuuuugauguguuugg

SEQ ID NO: 808860 - RNA, 20 nt, Artificial Sequence
  Synthetic
uuuguguugauuguguuugg

SEQ ID NO: 808861 - RNA, 20 nt, Artificial Sequence
  Synthetic
uaaccaauagguuuguuugg

SEQ ID NO: 808862 - RNA, 20 nt, Artificial Sequence
  Synthetic
uuaaauuuuuguuuguuugg

SEQ ID NO: 808863 - RNA, 20 nt, Artificial Sequence
  Synthetic
agguaagagaaaaauuuugg

SEQ ID NO: 808864 - RNA, 20 nt, Artificial Sequence
  Synthetic
acauggcccuuaaauuuugg

SEQ ID NO: 808865 - RNA, 20 nt, Artificial Sequence
  Synthetic
uuauuaucuuacaauuuugg

SEQ ID NO: 808866 - RNA, 20 nt, Artificial Sequence
  Synthetic
uuaagcuccagcaauuuugg

SEQ ID NO: 808867 - RNA, 20 nt, Artificial Sequence
  Synthetic
agaaagcuuuugaauuuugg

SEQ ID NO: 808868 - RNA, 20 nt, Artificial Sequence
  Synthetic
uuucaacauacacauuuugg

SEQ ID NO: 808869 - RNA, 20 nt, Artificial Sequence
  Synthetic
acagcacaagagcauuuugg

SEQ ID NO: 808870 - RNA, 20 nt, Artificial Sequence
  Synthetic
uaggacuagccucauuuugg

SEQ ID NO: 808871 - RNA, 20 nt, Artificial Sequence
  Synthetic
uaacaccauggugauuuugg

SEQ ID NO: 808872 - RNA, 20 nt, Artificial Sequence
  Synthetic
uuuauagauggauauuuugg

SEQ ID NO: 808873 - RNA, 20 nt, Artificial Sequence
  Synthetic
uucauuuauuuauauuuugg

SEQ ID NO: 808874 - RNA, 20 nt, Artificial Sequence
  Synthetic
agcuaaaaaauguauuuugg

SEQ ID NO: 808875 - RNA, 20 nt, Artificial Sequence
  Synthetic
ucaauuuaugcuuauuuugg

SEQ ID NO: 808876 - RNA, 20 nt, Artificial Sequence
  Synthetic
aggugagaggaaacuuuugg

SEQ ID NO: 808877 - RNA, 20 nt, Artificial Sequence
  Synthetic
caauaacaaauaacuuuugg

SEQ ID NO: 808878 - RNA, 20 nt, Artificial Sequence
  Synthetic
uuuuaaauccaagcuuuugg

SEQ ID NO: 808879 - RNA, 20 nt, Artificial Sequence
  Synthetic
caaguuagugcaucuuuugg

SEQ ID NO: 808880 - RNA, 20 nt, Artificial Sequence
  Synthetic
cauaaugacuucucuuuugg

SEQ ID NO: 808881 - RNA, 20 nt, Artificial Sequence
  Synthetic
auggguuucaacaguuuugg

SEQ ID NO: 808882 - RNA, 20 nt, Artificial Sequence
  Synthetic
aauuucaacaucaguuuugg

SEQ ID NO: 808883 - RNA, 20 nt, Artificial Sequence
  Synthetic
uauaauuucaguaguuuugg

SEQ ID NO: 808884 - RNA, 20 nt, Artificial Sequence
  Synthetic
ccuuuggauuuuaguuuugg

SEQ ID NO: 808885 - RNA, 20 nt, Artificial Sequence
  Synthetic
uauuaguaguuacguuuugg

SEQ ID NO: 808886 - RNA, 20 nt, Artificial Sequence
  Synthetic
uuucaccagcuugguuuugg

SEQ ID NO: 808887 - RNA, 20 nt, Artificial Sequence
  Synthetic
auccugcuucaauguuuugg

SEQ ID NO: 808888 - RNA, 20 nt, Artificial Sequence
  Synthetic
cuggagcagugauguuuugg

SEQ ID NO: 808889 - RNA, 20 nt, Artificial Sequence
  Synthetic
uguaaucccagcauuuuugg

SEQ ID NO: 808890 - RNA, 20 nt, Artificial Sequence
  Synthetic
aggugccuauugauuuuugg

SEQ ID NO: 808891 - RNA, 20 nt, Artificial Sequence
  Synthetic
uaugagcuacauauuuuugg

SEQ ID NO: 808892 - RNA, 20 nt, Artificial Sequence
  Synthetic
aguuaaaaaguuauuuuugg

SEQ ID NO: 808893 - RNA, 20 nt, Artificial Sequence
  Synthetic
uuagaaaugagacuuuuugg

SEQ ID NO: 808894 - RNA, 20 nt, Artificial Sequence
  Synthetic
accgucucccuccuuuuugg

SEQ ID NO: 808895 - RNA, 20 nt, Artificial Sequence
  Synthetic
uccuaaaauaauguuuuugg

SEQ ID NO: 808896 - RNA, 20 nt, Artificial Sequence
  Synthetic
ugauuuucuuucuuuuuugg

SEQ ID NO: 808897 - RNA, 20 nt, Artificial Sequence
  Synthetic
uuucuguuuuuguuuuuugg

SEQ ID NO: 808898 - RNA, 20 nt, Artificial Sequence
  Synthetic
cacuuuaagucuuuuuuugg

SEQ ID NO: 808899 - RNA, 20 nt, Artificial Sequence
  Synthetic
aaacaaaaaaaaaaaaaaug

SEQ ID NO: 808900 - RNA, 20 nt, Artificial Sequence
  Synthetic
ccccauggcaaaaaaaaaug

SEQ ID NO: 808901 - RNA, 20 nt, Artificial Sequence
  Synthetic
aauagaaaggaaaaaaaaug

SEQ ID NO: 808902 - RNA, 20 nt, Artificial Sequence
  Synthetic
caauaucggugaaaaaaaug

SEQ ID NO: 808903 - RNA, 20 nt, Artificial Sequence
  Synthetic
aauucagugcuaaaaaaaug

SEQ ID NO: 808904 - RNA, 20 nt, Artificial Sequence
  Synthetic
accaaaagagagaaaaaaug

SEQ ID NO: 808905 - RNA, 20 nt, Artificial Sequence
  Synthetic
uacaaaauccugaaaaaaug

SEQ ID NO: 808906 - RNA, 20 nt, Artificial Sequence
  Synthetic
aaaguauaauuuaaaaaaug

SEQ ID NO: 808907 - RNA, 20 nt, Artificial Sequence
  Synthetic
ccauauuuuuuuaaaaaaug

SEQ ID NO: 808908 - RNA, 20 nt, Artificial Sequence
  Synthetic
acuuaacaaagacaaaaaug

SEQ ID NO: 808909 - RNA, 20 nt, Artificial Sequence
  Synthetic
uuugccacaauacaaaaaug

SEQ ID NO: 808910 - RNA, 20 nt, Artificial Sequence
  Synthetic
auaaccuguuaccaaaaaug

SEQ ID NO: 808911 - RNA, 20 nt, Artificial Sequence
  Synthetic
uauaaagaaacccaaaaaug

SEQ ID NO: 808912 - RNA, 20 nt, Artificial Sequence
  Synthetic
caguagaucuuucaaaaaug

SEQ ID NO: 808913 - RNA, 20 nt, Artificial Sequence
  Synthetic
uucagcuaagaagaaaaaug

SEQ ID NO: 808914 - RNA, 20 nt, Artificial Sequence
  Synthetic
acacauuguauugaaaaaug

SEQ ID NO: 808915 - RNA, 20 nt, Artificial Sequence
  Synthetic
aguaaaugauuugaaaaaug

SEQ ID NO: 808916 - RNA, 20 nt, Artificial Sequence
  Synthetic
auaauaaauaaauaaaaaug

SEQ ID NO: 808917 - RNA, 20 nt, Artificial Sequence
  Synthetic
uuuccuuccuaauaaaaaug

SEQ ID NO: 808918 - RNA, 20 nt, Artificial Sequence
  Synthetic
caugaaggcccauaaaaaug

SEQ ID NO: 808919 - RNA, 20 nt, Artificial Sequence
  Synthetic
uugugccuauuuuaaaaaug

SEQ ID NO: 808920 - RNA, 20 nt, Artificial Sequence
  Synthetic
ucauuuugcuuuuaaaaaug

SEQ ID NO: 808921 - RNA, 20 nt, Artificial Sequence
  Synthetic
uaaaacuuuuuuuaaaaaug

SEQ ID NO: 808922 - RNA, 20 nt, Artificial Sequence
  Synthetic
uuaaaaaacaaaacaaaaug

SEQ ID NO: 808923 - RNA, 20 nt, Artificial Sequence
  Synthetic
auuuuugauauuacaaaaug

SEQ ID NO: 808924 - RNA, 20 nt, Artificial Sequence
  Synthetic
ucacugcagugaccaaaaug

SEQ ID NO: 808925 - RNA, 20 nt, Artificial Sequence
  Synthetic
aaucgcuguuucccaaaaug

SEQ ID NO: 808926 - RNA, 20 nt, Artificial Sequence
  Synthetic
uccuuuacuuugccaaaaug

SEQ ID NO: 808927 - RNA, 20 nt, Artificial Sequence
  Synthetic
uaauaucagccuccaaaaug

SEQ ID NO: 808928 - RNA, 20 nt, Artificial Sequence
  Synthetic
agugaaaacuaagcaaaaug

SEQ ID NO: 808929 - RNA, 20 nt, Artificial Sequence
  Synthetic
accagcauaucugcaaaaug

SEQ ID NO: 808930 - RNA, 20 nt, Artificial Sequence
  Synthetic
uccuguguuagugcaaaaug

SEQ ID NO: 808931 - RNA, 20 nt, Artificial Sequence
  Synthetic
uauuugcaaugaucaaaaug

SEQ ID NO: 808932 - RNA, 20 nt, Artificial Sequence
  Synthetic
cggagcaaaagcucaaaaug

SEQ ID NO: 808933 - RNA, 20 nt, Artificial Sequence
  Synthetic
uugcaaugguucucaaaaug

SEQ ID NO: 808934 - RNA, 20 nt, Artificial Sequence
  Synthetic
cagacugaauaaagaaaaug

SEQ ID NO: 808935 - RNA, 20 nt, Artificial Sequence
  Synthetic
augaauggauaaagaaaaug

SEQ ID NO: 808936 - RNA, 20 nt, Artificial Sequence
  Synthetic
augcauggauaaagaaaaug

SEQ ID NO: 808937 - RNA, 20 nt, Artificial Sequence
  Synthetic
uagacuggauaaagaaaaug

SEQ ID NO: 808938 - RNA, 20 nt, Artificial Sequence
  Synthetic
augaguggauaaagaaaaug

SEQ ID NO: 808939 - RNA, 20 nt, Artificial Sequence
  Synthetic
uagauuggauaaagaaaaug

SEQ ID NO: 808940 - RNA, 20 nt, Artificial Sequence
  Synthetic
uggacuggaugaagaaaaug

SEQ ID NO: 808941 - RNA, 20 nt, Artificial Sequence
  Synthetic
uagaccggauuaagaaaaug

SEQ ID NO: 808942 - RNA, 20 nt, Artificial Sequence
  Synthetic
uagacuggauuaagaaaaug

SEQ ID NO: 808943 - RNA, 20 nt, Artificial Sequence
  Synthetic
uauacuggauuaagaaaaug

SEQ ID NO: 808944 - RNA, 20 nt, Artificial Sequence
  Synthetic
uagacuggauacagaaaaug

SEQ ID NO: 808945 - RNA, 20 nt, Artificial Sequence
  Synthetic
uggaagcagaagagaaaaug

SEQ ID NO: 808946 - RNA, 20 nt, Artificial Sequence
  Synthetic
auaucauugaagagaaaaug

SEQ ID NO: 808947 - RNA, 20 nt, Artificial Sequence
  Synthetic
caauuaugagugagaaaaug

SEQ ID NO: 808948 - RNA, 20 nt, Artificial Sequence
  Synthetic
uagacuggauugagaaaaug

SEQ ID NO: 808949 - RNA, 20 nt, Artificial Sequence
  Synthetic
uagaucagauauagaaaaug

SEQ ID NO: 808950 - RNA, 20 nt, Artificial Sequence
  Synthetic
cuuuuuguuucuagaaaaug

SEQ ID NO: 808951 - RNA, 20 nt, Artificial Sequence
  Synthetic
ugaaaagacacccgaaaaug

SEQ ID NO: 808952 - RNA, 20 nt, Artificial Sequence
  Synthetic
cagaagaagacaggaaaaug

SEQ ID NO: 808953 - RNA, 20 nt, Artificial Sequence
  Synthetic
uagaagaugacaggaaaaug

SEQ ID NO: 808954 - RNA, 20 nt, Artificial Sequence
  Synthetic
uuucaguaagccggaaaaug

SEQ ID NO: 808955 - RNA, 20 nt, Artificial Sequence
  Synthetic
aaauggaagaagggaaaaug

SEQ ID NO: 808956 - RNA, 20 nt, Artificial Sequence
  Synthetic
uccagcaucuagggaaaaug

SEQ ID NO: 808957 - RNA, 20 nt, Artificial Sequence
  Synthetic
uuguuuucuaaaugaaaaug

SEQ ID NO: 808958 - RNA, 20 nt, Artificial Sequence
  Synthetic
uguaaauauaccugaaaaug

SEQ ID NO: 808959 - RNA, 20 nt, Artificial Sequence
  Synthetic
uguuuugaagagugaaaaug

SEQ ID NO: 808960 - RNA, 20 nt, Artificial Sequence
  Synthetic
uuaaaaugacugugaaaaug

SEQ ID NO: 808961 - RNA, 20 nt, Artificial Sequence
  Synthetic
uauaaagauacuugaaaaug

SEQ ID NO: 808962 - RNA, 20 nt, Artificial Sequence
  Synthetic
uucccuuuuaaaauaaaaug

SEQ ID NO: 808963 - RNA, 20 nt, Artificial Sequence
  Synthetic
ugcauaaaaugcauaaaaug

SEQ ID NO: 808964 - RNA, 20 nt, Artificial Sequence
  Synthetic
ugugacauaggccuaaaaug

SEQ ID NO: 808965 - RNA, 20 nt, Artificial Sequence
  Synthetic
aggcaaaacucaguaaaaug

SEQ ID NO: 808966 - RNA, 20 nt, Artificial Sequence
  Synthetic
uaagcacaucauguaaaaug

SEQ ID NO: 808967 - RNA, 20 nt, Artificial Sequence
  Synthetic
uccuuuugggauguaaaaug

SEQ ID NO: 808968 - RNA, 20 nt, Artificial Sequence
  Synthetic
auuucgucaacuguaaaaug

SEQ ID NO: 808969 - RNA, 20 nt, Artificial Sequence
  Synthetic
uuaugugaccguguaaaaug

SEQ ID NO: 808970 - RNA, 20 nt, Artificial Sequence
  Synthetic
agucauugaagauuaaaaug

SEQ ID NO: 808971 - RNA, 20 nt, Artificial Sequence
  Synthetic
aauauccuaauauuaaaaug

SEQ ID NO: 808972 - RNA, 20 nt, Artificial Sequence
  Synthetic
uucucagcuauauuaaaaug

SEQ ID NO: 808973 - RNA, 20 nt, Artificial Sequence
  Synthetic
uaacacuuguccuuaaaaug

SEQ ID NO: 808974 - RNA, 20 nt, Artificial Sequence
  Synthetic
aguguuucauucuuaaaaug

SEQ ID NO: 808975 - RNA, 20 nt, Artificial Sequence
  Synthetic
uaucgauauuucuuaaaaug

SEQ ID NO: 808976 - RNA, 20 nt, Artificial Sequence
  Synthetic
cauaaagagacuuuaaaaug

SEQ ID NO: 808977 - RNA, 20 nt, Artificial Sequence
  Synthetic
ccaguuguuauuuuaaaaug

SEQ ID NO: 808978 - RNA, 20 nt, Artificial Sequence
  Synthetic
uuauccucauuuaacaaaug

SEQ ID NO: 808979 - RNA, 20 nt, Artificial Sequence
  Synthetic
acugguuaaauccacaaaug

SEQ ID NO: 808980 - RNA, 20 nt, Artificial Sequence
  Synthetic
caagaauguauucacaaaug

SEQ ID NO: 808981 - RNA, 20 nt, Artificial Sequence
  Synthetic
uuuucaagucuucacaaaug

SEQ ID NO: 808982 - RNA, 20 nt, Artificial Sequence
  Synthetic
acagagauuucauacaaaug

SEQ ID NO: 808983 - RNA, 20 nt, Artificial Sequence
  Synthetic
aacauuuaaaccuacaaaug

SEQ ID NO: 808984 - RNA, 20 nt, Artificial Sequence
  Synthetic
augcccacauuuuacaaaug

SEQ ID NO: 808985 - RNA, 20 nt, Artificial Sequence
  Synthetic
auagaguagaggcccaaaug

SEQ ID NO: 808986 - RNA, 20 nt, Artificial Sequence
  Synthetic
ugaagcuuugaaagcaaaug

SEQ ID NO: 808987 - RNA, 20 nt, Artificial Sequence
  Synthetic
ugucagugcugaagcaaaug

SEQ ID NO: 808988 - RNA, 20 nt, Artificial Sequence
  Synthetic
uguaauuguauuagcaaaug

SEQ ID NO: 808989 - RNA, 20 nt, Artificial Sequence
  Synthetic
accaggcugacuggcaaaug

SEQ ID NO: 808990 - RNA, 20 nt, Artificial Sequence
  Synthetic
aaaaauuaacaaugcaaaug

SEQ ID NO: 808991 - RNA, 20 nt, Artificial Sequence
  Synthetic
uuaguagggcuaugcaaaug

SEQ ID NO: 808992 - RNA, 20 nt, Artificial Sequence
  Synthetic
uaaacauuucguugcaaaug

SEQ ID NO: 808993 - RNA, 20 nt, Artificial Sequence
  Synthetic
aaaauguuuuuuugcaaaug

SEQ ID NO: 808994 - RNA, 20 nt, Artificial Sequence
  Synthetic
aaagagcucacaaucaaaug

SEQ ID NO: 808995 - RNA, 20 nt, Artificial Sequence
  Synthetic
agccaacaagagaucaaaug

SEQ ID NO: 808996 - RNA, 20 nt, Artificial Sequence
  Synthetic
cugacaaaaaacaagaaaug

SEQ ID NO: 808997 - RNA, 20 nt, Artificial Sequence
  Synthetic
ccugacaaaaacaagaaaug

SEQ ID NO: 808998 - RNA, 20 nt, Artificial Sequence
  Synthetic
aggcccuggaucaagaaaug

SEQ ID NO: 808999 - RNA, 20 nt, Artificial Sequence
  Synthetic
aaccacacugucaagaaaug

SEQ ID NO: 809000 - RNA, 20 nt, Artificial Sequence
  Synthetic
caaggagaguggaagaaaug

SEQ ID NO: 809001 - RNA, 20 nt, Artificial Sequence
  Synthetic
ccuacauacaguaagaaaug

SEQ ID NO: 809002 - RNA, 20 nt, Artificial Sequence
  Synthetic
aaccuuggaauuaagaaaug

SEQ ID NO: 809003 - RNA, 20 nt, Artificial Sequence
  Synthetic
cucagaauuuggcagaaaug

SEQ ID NO: 809004 - RNA, 20 nt, Artificial Sequence
  Synthetic
auuggcccacugcagaaaug

SEQ ID NO: 809005 - RNA, 20 nt, Artificial Sequence
  Synthetic
acaccuaagaaucagaaaug

SEQ ID NO: 809006 - RNA, 20 nt, Artificial Sequence
  Synthetic
agagauucuccucagaaaug

SEQ ID NO: 809007 - RNA, 20 nt, Artificial Sequence
  Synthetic
aagcagcuggaagagaaaug

SEQ ID NO: 809008 - RNA, 20 nt, Artificial Sequence
  Synthetic
uguguugguuaagagaaaug

SEQ ID NO: 809009 - RNA, 20 nt, Artificial Sequence
  Synthetic
agauaauuuauagagaaaug

SEQ ID NO: 809010 - RNA, 20 nt, Artificial Sequence
  Synthetic
uuuuacacagaggagaaaug

SEQ ID NO: 809011 - RNA, 20 nt, Artificial Sequence
  Synthetic
uuacuucuauaugagaaaug

SEQ ID NO: 809012 - RNA, 20 nt, Artificial Sequence
  Synthetic
aaacuuaaaacugagaaaug

SEQ ID NO: 809013 - RNA, 20 nt, Artificial Sequence
  Synthetic
ugaaaggaauuugagaaaug

SEQ ID NO: 809014 - RNA, 20 nt, Artificial Sequence
  Synthetic
auuaaacgugcaaggaaaug

SEQ ID NO: 809015 - RNA, 20 nt, Artificial Sequence
  Synthetic
aggguaguugugaggaaaug

SEQ ID NO: 809016 - RNA, 20 nt, Artificial Sequence
  Synthetic
acuuggugauauaggaaaug

SEQ ID NO: 809017 - RNA, 20 nt, Artificial Sequence
  Synthetic
uggagagauuaggggaaaug

SEQ ID NO: 809018 - RNA, 20 nt, Artificial Sequence
  Synthetic
aaucaccuauaguggaaaug

SEQ ID NO: 809019 - RNA, 20 nt, Artificial Sequence
  Synthetic
auguauaaaauuuggaaaug

SEQ ID NO: 809020 - RNA, 20 nt, Artificial Sequence
  Synthetic
ugagguuuacuuuggaaaug

SEQ ID NO: 809021 - RNA, 20 nt, Artificial Sequence
  Synthetic
acauucugcuacaugaaaug

SEQ ID NO: 809022 - RNA, 20 nt, Artificial Sequence
  Synthetic
aaggagggaaagaugaaaug

SEQ ID NO: 809023 - RNA, 20 nt, Artificial Sequence
  Synthetic
uaaacugaucuuaugaaaug

SEQ ID NO: 809024 - RNA, 20 nt, Artificial Sequence
  Synthetic
ucagucuguugacugaaaug

SEQ ID NO: 809025 - RNA, 20 nt, Artificial Sequence
  Synthetic
aauugccauuuacugaaaug

SEQ ID NO: 809026 - RNA, 20 nt, Artificial Sequence
  Synthetic
uugugaauagugcugaaaug

SEQ ID NO: 809027 - RNA, 20 nt, Artificial Sequence
  Synthetic
aauugagauccucugaaaug

SEQ ID NO: 809028 - RNA, 20 nt, Artificial Sequence
  Synthetic
ucucaucuucaagugaaaug

SEQ ID NO: 809029 - RNA, 20 nt, Artificial Sequence
  Synthetic
uuuuauggguccgugaaaug

SEQ ID NO: 809030 - RNA, 20 nt, Artificial Sequence
  Synthetic
caaagaauugaggugaaaug

SEQ ID NO: 809031 - RNA, 20 nt, Artificial Sequence
  Synthetic
uuuucuuauuuggugaaaug

SEQ ID NO: 809032 - RNA, 20 nt, Artificial Sequence
  Synthetic
ccaagucuccuguugaaaug

SEQ ID NO: 809033 - RNA, 20 nt, Artificial Sequence
  Synthetic
uuuauugagaaaaauaaaug

SEQ ID NO: 809034 - RNA, 20 nt, Artificial Sequence
  Synthetic
aauacaugaacaaauaaaug

SEQ ID NO: 809035 - RNA, 20 nt, Artificial Sequence
  Synthetic
uuuaacaauaacaauaaaug

SEQ ID NO: 809036 - RNA, 20 nt, Artificial Sequence
  Synthetic
uaauugguucucaauaaaug

SEQ ID NO: 809037 - RNA, 20 nt, Artificial Sequence
  Synthetic
auaaauaaggagaauaaaug

SEQ ID NO: 809038 - RNA, 20 nt, Artificial Sequence
  Synthetic
uuacuuuccaugaauaaaug

SEQ ID NO: 809039 - RNA, 20 nt, Artificial Sequence
  Synthetic
aagaaaaauuagcauaaaug

SEQ ID NO: 809040 - RNA, 20 nt, Artificial Sequence
  Synthetic
caauggcugagggauaaaug

SEQ ID NO: 809041 - RNA, 20 nt, Artificial Sequence
  Synthetic
aaccauaagguggauaaaug

SEQ ID NO: 809042 - RNA, 20 nt, Artificial Sequence
  Synthetic
agagaaauucuugauaaaug

SEQ ID NO: 809043 - RNA, 20 nt, Artificial Sequence
  Synthetic
uaggaaacugaauauaaaug

SEQ ID NO: 809044 - RNA, 20 nt, Artificial Sequence
  Synthetic
aaaugcaaggcuuauaaaug

SEQ ID NO: 809045 - RNA, 20 nt, Artificial Sequence
  Synthetic
aauagguggaggacuaaaug

SEQ ID NO: 809046 - RNA, 20 nt, Artificial Sequence
  Synthetic
ugcuuuuaaacugcuaaaug

SEQ ID NO: 809047 - RNA, 20 nt, Artificial Sequence
  Synthetic
uauuuccagauagguaaaug

SEQ ID NO: 809048 - RNA, 20 nt, Artificial Sequence
  Synthetic
cauaauaaaaaugguaaaug

SEQ ID NO: 809049 - RNA, 20 nt, Artificial Sequence
  Synthetic
ugggaguacagugguaaaug

SEQ ID NO: 809050 - RNA, 20 nt, Artificial Sequence
  Synthetic
ucauuucagggugguaaaug

SEQ ID NO: 809051 - RNA, 20 nt, Artificial Sequence
  Synthetic
ugcaggcaaaauuguaaaug

SEQ ID NO: 809052 - RNA, 20 nt, Artificial Sequence
  Synthetic
aaacaguauuuccuuaaaug

SEQ ID NO: 809053 - RNA, 20 nt, Artificial Sequence
  Synthetic
cacuguaauuugcuuaaaug

SEQ ID NO: 809054 - RNA, 20 nt, Artificial Sequence
  Synthetic
acacuuaagaaaguuaaaug

SEQ ID NO: 809055 - RNA, 20 nt, Artificial Sequence
  Synthetic
aggugguggaacguuaaaug

SEQ ID NO: 809056 - RNA, 20 nt, Artificial Sequence
  Synthetic
auuuccucauuuguuaaaug

SEQ ID NO: 809057 - RNA, 20 nt, Artificial Sequence
  Synthetic
caucagagugaauuuaaaug

SEQ ID NO: 809058 - RNA, 20 nt, Artificial Sequence
  Synthetic
caggcuuagcucuuuaaaug

SEQ ID NO: 809059 - RNA, 20 nt, Artificial Sequence
  Synthetic
uagaggaggaguuuuaaaug

SEQ ID NO: 809060 - RNA, 20 nt, Artificial Sequence
  Synthetic
ccacccaaguguuuuaaaug

SEQ ID NO: 809061 - RNA, 20 nt, Artificial Sequence
  Synthetic
aguugccauaaaaaacaaug

SEQ ID NO: 809062 - RNA, 20 nt, Artificial Sequence
  Synthetic
caaaaagaaagaaaacaaug

SEQ ID NO: 809063 - RNA, 20 nt, Artificial Sequence
  Synthetic
cauuaugugaauaaacaaug

SEQ ID NO: 809064 - RNA, 20 nt, Artificial Sequence
  Synthetic
auuguaauauaccaacaaug

SEQ ID NO: 809065 - RNA, 20 nt, Artificial Sequence
  Synthetic
uagauuuagcugcaacaaug

SEQ ID NO: 809066 - RNA, 20 nt, Artificial Sequence
  Synthetic
augccaaaaauagaacaaug

SEQ ID NO: 809067 - RNA, 20 nt, Artificial Sequence
  Synthetic
uauaucuuuuucuaacaaug

SEQ ID NO: 809068 - RNA, 20 nt, Artificial Sequence
  Synthetic
uaagugagcuuuuaacaaug

SEQ ID NO: 809069 - RNA, 20 nt, Artificial Sequence
  Synthetic
caggggaacaacacacaaug

SEQ ID NO: 809070 - RNA, 20 nt, Artificial Sequence
  Synthetic
auaucuuccauuccacaaug

SEQ ID NO: 809071 - RNA, 20 nt, Artificial Sequence
  Synthetic
ugcuuuuuuuauucacaaug

SEQ ID NO: 809072 - RNA, 20 nt, Artificial Sequence
  Synthetic
auuagcuuguaaagacaaug

SEQ ID NO: 809073 - RNA, 20 nt, Artificial Sequence
  Synthetic
uguuaagcgccaagacaaug

SEQ ID NO: 809074 - RNA, 20 nt, Artificial Sequence
  Synthetic
uguuaauaggcaagacaaug

SEQ ID NO: 809075 - RNA, 20 nt, Artificial Sequence
  Synthetic
uguagaaugagaagacaaug

SEQ ID NO: 809076 - RNA, 20 nt, Artificial Sequence
  Synthetic
uuacuugugcuaagacaaug

SEQ ID NO: 809077 - RNA, 20 nt, Artificial Sequence
  Synthetic
aucuuccccuauugacaaug

SEQ ID NO: 809078 - RNA, 20 nt, Artificial Sequence
  Synthetic
uaauagcaggaaauacaaug

SEQ ID NO: 809079 - RNA, 20 nt, Artificial Sequence
  Synthetic
cugcccugucuaauacaaug

SEQ ID NO: 809080 - RNA, 20 nt, Artificial Sequence
  Synthetic
ucuuaccauaugcuacaaug

SEQ ID NO: 809081 - RNA, 20 nt, Artificial Sequence
  Synthetic
auaaaacacauguaccaaug

SEQ ID NO: 809082 - RNA, 20 nt, Artificial Sequence
  Synthetic
acagugucuucuuaccaaug

SEQ ID NO: 809083 - RNA, 20 nt, Artificial Sequence
  Synthetic
uguuacuuuauuucccaaug

SEQ ID NO: 809084 - RNA, 20 nt, Artificial Sequence
  Synthetic
cggcuaucugcaagccaaug

SEQ ID NO: 809085 - RNA, 20 nt, Artificial Sequence
  Synthetic
cgacccaaccccagccaaug

SEQ ID NO: 809086 - RNA, 20 nt, Artificial Sequence
  Synthetic
aaacucaaauucugccaaug

SEQ ID NO: 809087 - RNA, 20 nt, Artificial Sequence
  Synthetic
acaacuuucaugugccaaug

SEQ ID NO: 809088 - RNA, 20 nt, Artificial Sequence
  Synthetic
caugcaugucaaauccaaug

SEQ ID NO: 809089 - RNA, 20 nt, Artificial Sequence
  Synthetic
cuagaaugcaaacuccaaug

SEQ ID NO: 809090 - RNA, 20 nt, Artificial Sequence
  Synthetic
aacaucaguguuuuccaaug

SEQ ID NO: 809091 - RNA, 20 nt, Artificial Sequence
  Synthetic
ccugacaaaaacaagcaaug

SEQ ID NO: 809092 - RNA, 20 nt, Artificial Sequence
  Synthetic
ccugagaaaaacaagcaaug

SEQ ID NO: 809093 - RNA, 20 nt, Artificial Sequence
  Synthetic
ccugaggaaaacaagcaaug

SEQ ID NO: 809094 - RNA, 20 nt, Artificial Sequence
  Synthetic
ucuccauacuggcagcaaug

SEQ ID NO: 809095 - RNA, 20 nt, Artificial Sequence
  Synthetic
aggguauauguagagcaaug

SEQ ID NO: 809096 - RNA, 20 nt, Artificial Sequence
  Synthetic
uacuugauaaaggagcaaug

SEQ ID NO: 809097 - RNA, 20 nt, Artificial Sequence
  Synthetic
uauucauucacugagcaaug

SEQ ID NO: 809098 - RNA, 20 nt, Artificial Sequence
  Synthetic
cuacaggggagaaggcaaug

SEQ ID NO: 809099 - RNA, 20 nt, Artificial Sequence
  Synthetic
ugagaccagcuuaggcaaug

SEQ ID NO: 809100 - RNA, 20 nt, Artificial Sequence
  Synthetic
aguagauuucuagggcaaug

SEQ ID NO: 809101 - RNA, 20 nt, Artificial Sequence
  Synthetic
ucaggauugucuuggcaaug

SEQ ID NO: 809102 - RNA, 20 nt, Artificial Sequence
  Synthetic
uuugaaacuccagugcaaug

SEQ ID NO: 809103 - RNA, 20 nt, Artificial Sequence
  Synthetic
cugucaacuuuugugcaaug

SEQ ID NO: 809104 - RNA, 20 nt, Artificial Sequence
  Synthetic
accccacaaauauugcaaug

SEQ ID NO: 809105 - RNA, 20 nt, Artificial Sequence
  Synthetic
cucaggauacaaaaucaaug

SEQ ID NO: 809106 - RNA, 20 nt, Artificial Sequence
  Synthetic
acauucauggcaaaucaaug

SEQ ID NO: 809107 - RNA, 20 nt, Artificial Sequence
  Synthetic
auaaaaccuucaaaucaaug

SEQ ID NO: 809108 - RNA, 20 nt, Artificial Sequence
  Synthetic
uugggauacauacaucaaug

SEQ ID NO: 809109 - RNA, 20 nt, Artificial Sequence
  Synthetic
auuuacuggagauaucaaug

SEQ ID NO: 809110 - RNA, 20 nt, Artificial Sequence
  Synthetic
cuacaauuauuaagucaaug

SEQ ID NO: 809111 - RNA, 20 nt, Artificial Sequence
  Synthetic
uuuagaaaagggagucaaug

SEQ ID NO: 809112 - RNA, 20 nt, Artificial Sequence
  Synthetic
uaaggugaauugagucaaug

SEQ ID NO: 809113 - RNA, 20 nt, Artificial Sequence
  Synthetic
aacuaggagggaggucaaug

SEQ ID NO: 809114 - RNA, 20 nt, Artificial Sequence
  Synthetic
agauuucuuaaaugucaaug

SEQ ID NO: 809115 - RNA, 20 nt, Artificial Sequence
  Synthetic
uagaaucuucggauucaaug

SEQ ID NO: 809116 - RNA, 20 nt, Artificial Sequence
  Synthetic
aguuugcucaagguucaaug

SEQ ID NO: 809117 - RNA, 20 nt, Artificial Sequence
  Synthetic
auguuuaaaaaaaaagaaug

SEQ ID NO: 809118 - RNA, 20 nt, Artificial Sequence
  Synthetic
acgguggucaccaaagaaug

SEQ ID NO: 809119 - RNA, 20 nt, Artificial Sequence
  Synthetic
agcaaagaucucaaagaaug

SEQ ID NO: 809120 - RNA, 20 nt, Artificial Sequence
  Synthetic
aguuacuguuucaaagaaug

SEQ ID NO: 809121 - RNA, 20 nt, Artificial Sequence
  Synthetic
uuauguauuagacaagaaug

SEQ ID NO: 809122 - RNA, 20 nt, Artificial Sequence
  Synthetic
uaauccagaaaucaagaaug

SEQ ID NO: 809123 - RNA, 20 nt, Artificial Sequence
  Synthetic
ucaagacacagucaagaaug

SEQ ID NO: 809124 - RNA, 20 nt, Artificial Sequence
  Synthetic
acaaagagcaaugaagaaug

SEQ ID NO: 809125 - RNA, 20 nt, Artificial Sequence
  Synthetic
aaaugcacagaauaagaaug

SEQ ID NO: 809126 - RNA, 20 nt, Artificial Sequence
  Synthetic
auaaaaaaaugauaagaaug

SEQ ID NO: 809127 - RNA, 20 nt, Artificial Sequence
  Synthetic
aagcuaucuuacuaagaaug

SEQ ID NO: 809128 - RNA, 20 nt, Artificial Sequence
  Synthetic
augaauggguucuaagaaug

SEQ ID NO: 809129 - RNA, 20 nt, Artificial Sequence
  Synthetic
cagaaaaggaagacagaaug

SEQ ID NO: 809130 - RNA, 20 nt, Artificial Sequence
  Synthetic
aaauucucuuaaccagaaug

SEQ ID NO: 809131 - RNA, 20 nt, Artificial Sequence
  Synthetic
cccuaagaucaugcagaaug

SEQ ID NO: 809132 - RNA, 20 nt, Artificial Sequence
  Synthetic
aggcugucugaugcagaaug

SEQ ID NO: 809133 - RNA, 20 nt, Artificial Sequence
  Synthetic
aguugggagucaucagaaug

SEQ ID NO: 809134 - RNA, 20 nt, Artificial Sequence
  Synthetic
uugcuugaaguuucagaaug

SEQ ID NO: 809135 - RNA, 20 nt, Artificial Sequence
  Synthetic
auggaaaccaaaagagaaug

SEQ ID NO: 809136 - RNA, 20 nt, Artificial Sequence
  Synthetic
uaaaaucuggaaagagaaug

SEQ ID NO: 809137 - RNA, 20 nt, Artificial Sequence
  Synthetic
ucaacagauagaagagaaug

SEQ ID NO: 809138 - RNA, 20 nt, Artificial Sequence
  Synthetic
cagagaaauaucagagaaug

SEQ ID NO: 809139 - RNA, 20 nt, Artificial Sequence
  Synthetic
ugccugggcuggagagaaug

SEQ ID NO: 809140 - RNA, 20 nt, Artificial Sequence
  Synthetic
uugccuggcaagggagaaug

SEQ ID NO: 809141 - RNA, 20 nt, Artificial Sequence
  Synthetic
caagcacaucauggagaaug

SEQ ID NO: 809142 - RNA, 20 nt, Artificial Sequence
  Synthetic
cagugaagcucuggagaaug

SEQ ID NO: 809143 - RNA, 20 nt, Artificial Sequence
  Synthetic
uuguuuuuuuucugagaaug

SEQ ID NO: 809144 - RNA, 20 nt, Artificial Sequence
  Synthetic
cauuauacuuucauagaaug

SEQ ID NO: 809145 - RNA, 20 nt, Artificial Sequence
  Synthetic
uaaagacuauagauagaaug

SEQ ID NO: 809146 - RNA, 20 nt, Artificial Sequence
  Synthetic
uucaucagauuacuagaaug

SEQ ID NO: 809147 - RNA, 20 nt, Artificial Sequence
  Synthetic
agaggacaacuucuagaaug

SEQ ID NO: 809148 - RNA, 20 nt, Artificial Sequence
  Synthetic
uuguuuucacaauuagaaug

SEQ ID NO: 809149 - RNA, 20 nt, Artificial Sequence
  Synthetic
uggcaguuuguuuuagaaug

SEQ ID NO: 809150 - RNA, 20 nt, Artificial Sequence
  Synthetic
auauuaagcaugaccgaaug

SEQ ID NO: 809151 - RNA, 20 nt, Artificial Sequence
  Synthetic
ucuguuugaaauaucgaaug

SEQ ID NO: 809152 - RNA, 20 nt, Artificial Sequence
  Synthetic
ugaaaaguacauuucgaaug

SEQ ID NO: 809153 - RNA, 20 nt, Artificial Sequence
  Synthetic
acaaguaaaccuaaggaaug

SEQ ID NO: 809154 - RNA, 20 nt, Artificial Sequence
  Synthetic
ugguauaauguuaaggaaug

SEQ ID NO: 809155 - RNA, 20 nt, Artificial Sequence
  Synthetic
uuuaaaauauuacaggaaug

SEQ ID NO: 809156 - RNA, 20 nt, Artificial Sequence
  Synthetic
auuguuggagaguaggaaug

SEQ ID NO: 809157 - RNA, 20 nt, Artificial Sequence
  Synthetic
uagaguuuuguacuggaaug

SEQ ID NO: 809158 - RNA, 20 nt, Artificial Sequence
  Synthetic
aggaacuagggccuggaaug

SEQ ID NO: 809159 - RNA, 20 nt, Artificial Sequence
  Synthetic
uucaagugagaucuggaaug

SEQ ID NO: 809160 - RNA, 20 nt, Artificial Sequence
  Synthetic
caccuugagaggguggaaug

SEQ ID NO: 809161 - RNA, 20 nt, Artificial Sequence
  Synthetic
aaacaaaaauucuuggaaug

SEQ ID NO: 809162 - RNA, 20 nt, Artificial Sequence
  Synthetic
cuuacauccuucuuggaaug

SEQ ID NO: 809163 - RNA, 20 nt, Artificial Sequence
  Synthetic
auguuuuauacaaaugaaug

SEQ ID NO: 809164 - RNA, 20 nt, Artificial Sequence
  Synthetic
uaggagagaagaaaugaaug

SEQ ID NO: 809165 - RNA, 20 nt, Artificial Sequence
  Synthetic
aaugaacaaauaaaugaaug

SEQ ID NO: 809166 - RNA, 20 nt, Artificial Sequence
  Synthetic
uguugcuuaaacaaugaaug

SEQ ID NO: 809167 - RNA, 20 nt, Artificial Sequence
  Synthetic
cuuaaaaugagcaaugaaug

SEQ ID NO: 809168 - RNA, 20 nt, Artificial Sequence
  Synthetic
ccauuaccugggaaugaaug

SEQ ID NO: 809169 - RNA, 20 nt, Artificial Sequence
  Synthetic
cuagcuuuguugaaugaaug

SEQ ID NO: 809170 - RNA, 20 nt, Artificial Sequence
  Synthetic
aaaaaaaggaaacaugaaug

SEQ ID NO: 809171 - RNA, 20 nt, Artificial Sequence
  Synthetic
cuugagauucaccaugaaug

SEQ ID NO: 809172 - RNA, 20 nt, Artificial Sequence
  Synthetic
uauguuuguuaucaugaaug

SEQ ID NO: 809173 - RNA, 20 nt, Artificial Sequence
  Synthetic
accagguuugcugaugaaug

SEQ ID NO: 809174 - RNA, 20 nt, Artificial Sequence
  Synthetic
aaaacuucaacauaugaaug

SEQ ID NO: 809175 - RNA, 20 nt, Artificial Sequence
  Synthetic
auuuucaauaucuaugaaug

SEQ ID NO: 809176 - RNA, 20 nt, Artificial Sequence
  Synthetic
aauuucucaucuuaugaaug

SEQ ID NO: 809177 - RNA, 20 nt, Artificial Sequence
  Synthetic
ccuucaucagucacugaaug

SEQ ID NO: 809178 - RNA, 20 nt, Artificial Sequence
  Synthetic
agugccuuugcuacugaaug

SEQ ID NO: 809179 - RNA, 20 nt, Artificial Sequence
  Synthetic
agcuaaggauucccugaaug

SEQ ID NO: 809180 - RNA, 20 nt, Artificial Sequence
  Synthetic
auauaaccaacaucugaaug

SEQ ID NO: 809181 - RNA, 20 nt, Artificial Sequence
  Synthetic
aaggucagguuaucugaaug

SEQ ID NO: 809182 - RNA, 20 nt, Artificial Sequence
  Synthetic
cagaaugggagaggugaaug

SEQ ID NO: 809183 - RNA, 20 nt, Artificial Sequence
  Synthetic
aacaagagaaucugugaaug

SEQ ID NO: 809184 - RNA, 20 nt, Artificial Sequence
  Synthetic
agacaguaguauugugaaug

SEQ ID NO: 809185 - RNA, 20 nt, Artificial Sequence
  Synthetic
agcccagagguaauugaaug

SEQ ID NO: 809186 - RNA, 20 nt, Artificial Sequence
  Synthetic
uaguguagauucauugaaug

SEQ ID NO: 809187 - RNA, 20 nt, Artificial Sequence
  Synthetic
auuguggugggucuugaaug

SEQ ID NO: 809188 - RNA, 20 nt, Artificial Sequence
  Synthetic
uaaaaacacaagguugaaug

SEQ ID NO: 809189 - RNA, 20 nt, Artificial Sequence
  Synthetic
ccacaauuucuuguugaaug

SEQ ID NO: 809190 - RNA, 20 nt, Artificial Sequence
  Synthetic
ucccaggauggcuuugaaug

SEQ ID NO: 809191 - RNA, 20 nt, Artificial Sequence
  Synthetic
cacaacuacugcuuugaaug

SEQ ID NO: 809192 - RNA, 20 nt, Artificial Sequence
  Synthetic
auaaauaauuaaaaauaaug

SEQ ID NO: 809193 - RNA, 20 nt, Artificial Sequence
  Synthetic
uguuuacauaagaaauaaug

SEQ ID NO: 809194 - RNA, 20 nt, Artificial Sequence
  Synthetic
aaauaaauaaauaaauaaug

SEQ ID NO: 809195 - RNA, 20 nt, Artificial Sequence
  Synthetic
aagccaguaaguaaauaaug

SEQ ID NO: 809196 - RNA, 20 nt, Artificial Sequence
  Synthetic
cacaggcagcaggaauaaug

SEQ ID NO: 809197 - RNA, 20 nt, Artificial Sequence
  Synthetic
caugaaaaauuggaauaaug

SEQ ID NO: 809198 - RNA, 20 nt, Artificial Sequence
  Synthetic
acaggggaauuauaauaaug

SEQ ID NO: 809199 - RNA, 20 nt, Artificial Sequence
  Synthetic
uaaaaaaacugcuaauaaug

SEQ ID NO: 809200 - RNA, 20 nt, Artificial Sequence
  Synthetic
uacuguuggcuguaauaaug

SEQ ID NO: 809201 - RNA, 20 nt, Artificial Sequence
  Synthetic
ugggcuaauguagcauaaug

SEQ ID NO: 809202 - RNA, 20 nt, Artificial Sequence
  Synthetic
uaagcagaggccagauaaug

SEQ ID NO: 809203 - RNA, 20 nt, Artificial Sequence
  Synthetic
auggaaucagagagauaaug

SEQ ID NO: 809204 - RNA, 20 nt, Artificial Sequence
  Synthetic
cucaauuaaaaaggauaaug

SEQ ID NO: 809205 - RNA, 20 nt, Artificial Sequence
  Synthetic
ucuucuccuucaggauaaug

SEQ ID NO: 809206 - RNA, 20 nt, Artificial Sequence
  Synthetic
uuggugaaaugaggauaaug

SEQ ID NO: 809207 - RNA, 20 nt, Artificial Sequence
  Synthetic
cuuaaauacaguggauaaug

SEQ ID NO: 809208 - RNA, 20 nt, Artificial Sequence
  Synthetic
uguacaauguacugauaaug

SEQ ID NO: 809209 - RNA, 20 nt, Artificial Sequence
  Synthetic
ccgugcuugaaaauauaaug

SEQ ID NO: 809210 - RNA, 20 nt, Artificial Sequence
  Synthetic
caaacugguucuguauaaug

SEQ ID NO: 809211 - RNA, 20 nt, Artificial Sequence
  Synthetic
uuaaauuauaaauuauaaug

SEQ ID NO: 809212 - RNA, 20 nt, Artificial Sequence
  Synthetic
agaagacaauuuuuauaaug

SEQ ID NO: 809213 - RNA, 20 nt, Artificial Sequence
  Synthetic
auuuaaaaaaaucacuaaug

SEQ ID NO: 809214 - RNA, 20 nt, Artificial Sequence
  Synthetic
cuguacuucaguagcuaaug

SEQ ID NO: 809215 - RNA, 20 nt, Artificial Sequence
  Synthetic
aaacucuagcauggcuaaug

SEQ ID NO: 809216 - RNA, 20 nt, Artificial Sequence
  Synthetic
caacaaccuuauggcuaaug

SEQ ID NO: 809217 - RNA, 20 nt, Artificial Sequence
  Synthetic
aaaaugugaauacucuaaug

SEQ ID NO: 809218 - RNA, 20 nt, Artificial Sequence
  Synthetic
acucaucuucuucucuaaug

SEQ ID NO: 809219 - RNA, 20 nt, Artificial Sequence
  Synthetic
auuugugggagugucuaaug

SEQ ID NO: 809220 - RNA, 20 nt, Artificial Sequence
  Synthetic
uuuuucagaucauucuaaug

SEQ ID NO: 809221 - RNA, 20 nt, Artificial Sequence
  Synthetic
uaaauugaaucuuucuaaug

SEQ ID NO: 809222 - RNA, 20 nt, Artificial Sequence
  Synthetic
uuuuaauuagaaaaguaaug

SEQ ID NO: 809223 - RNA, 20 nt, Artificial Sequence
  Synthetic
aucuuacacuucaaguaaug

SEQ ID NO: 809224 - RNA, 20 nt, Artificial Sequence
  Synthetic
acuagaugauugcaguaaug

SEQ ID NO: 809225 - RNA, 20 nt, Artificial Sequence
  Synthetic
aauucuggaacugaguaaug

SEQ ID NO: 809226 - RNA, 20 nt, Artificial Sequence
  Synthetic
cauuugaguagauaguaaug

SEQ ID NO: 809227 - RNA, 20 nt, Artificial Sequence
  Synthetic
ucauucauucccagguaaug

SEQ ID NO: 809228 - RNA, 20 nt, Artificial Sequence
  Synthetic
auagugagagauugguaaug

SEQ ID NO: 809229 - RNA, 20 nt, Artificial Sequence
  Synthetic
uugaccuaagagauguaaug

SEQ ID NO: 809230 - RNA, 20 nt, Artificial Sequence
  Synthetic
cagucaugcuauguguaaug

SEQ ID NO: 809231 - RNA, 20 nt, Artificial Sequence
  Synthetic
uuuauuaagaccuuguaaug

SEQ ID NO: 809232 - RNA, 20 nt, Artificial Sequence
  Synthetic
auucuaccuuccuuguaaug

SEQ ID NO: 809233 - RNA, 20 nt, Artificial Sequence
  Synthetic
caaugugauuauuuguaaug

SEQ ID NO: 809234 - RNA, 20 nt, Artificial Sequence
  Synthetic
cauauaauaucuuuguaaug

SEQ ID NO: 809235 - RNA, 20 nt, Artificial Sequence
  Synthetic
aaaaacuguaagaauuaaug

SEQ ID NO: 809236 - RNA, 20 nt, Artificial Sequence
  Synthetic
agcuauaaaguucauuaaug

SEQ ID NO: 809237 - RNA, 20 nt, Artificial Sequence
  Synthetic
aaaaaaaauguucauuaaug

SEQ ID NO: 809238 - RNA, 20 nt, Artificial Sequence
  Synthetic
acacuaucucuagauuaaug

SEQ ID NO: 809239 - RNA, 20 nt, Artificial Sequence
  Synthetic
uagugugaaauauauuaaug

SEQ ID NO: 809240 - RNA, 20 nt, Artificial Sequence
  Synthetic
ucaacacucucaacuuaaug

SEQ ID NO: 809241 - RNA, 20 nt, Artificial Sequence
  Synthetic
agagaaaucaucuguuaaug

SEQ ID NO: 809242 - RNA, 20 nt, Artificial Sequence
  Synthetic
uaugggucuaucuguuaaug

SEQ ID NO: 809243 - RNA, 20 nt, Artificial Sequence
  Synthetic
acaauggauauuuguuaaug

SEQ ID NO: 809244 - RNA, 20 nt, Artificial Sequence
  Synthetic
acacuccuauccauuuaaug

SEQ ID NO: 809245 - RNA, 20 nt, Artificial Sequence
  Synthetic
aaagagguacaaguuuaaug

SEQ ID NO: 809246 - RNA, 20 nt, Artificial Sequence
  Synthetic
cuuuuccuuuugguuuaaug

SEQ ID NO: 809247 - RNA, 20 nt, Artificial Sequence
  Synthetic
augucucucucauuuuaaug

SEQ ID NO: 809248 - RNA, 20 nt, Artificial Sequence
  Synthetic
cacauagaaauauuuuaaug

SEQ ID NO: 809249 - RNA, 20 nt, Artificial Sequence
  Synthetic
uuauuuuuacuauuuuaaug

SEQ ID NO: 809250 - RNA, 20 nt, Artificial Sequence
  Synthetic
uucuuauugauuuuuuaaug

SEQ ID NO: 809251 - RNA, 20 nt, Artificial Sequence
  Synthetic
ucuuuucaauaaaaaacaug

SEQ ID NO: 809252 - RNA, 20 nt, Artificial Sequence
  Synthetic
aaacagaacauuaaaacaug

SEQ ID NO: 809253 - RNA, 20 nt, Artificial Sequence
  Synthetic
cagaaaugaauauaaacaug

SEQ ID NO: 809254 - RNA, 20 nt, Artificial Sequence
  Synthetic
uucaagcaguuuuaaacaug

SEQ ID NO: 809255 - RNA, 20 nt, Artificial Sequence
  Synthetic
acuuccuucuccccaacaug

SEQ ID NO: 809256 - RNA, 20 nt, Artificial Sequence
  Synthetic
auugaguaguuuccaacaug

SEQ ID NO: 809257 - RNA, 20 nt, Artificial Sequence
  Synthetic
ccaccaaauuuagcaacaug

SEQ ID NO: 809258 - RNA, 20 nt, Artificial Sequence
  Synthetic
aaacagcaaaauucaacaug

SEQ ID NO: 809259 - RNA, 20 nt, Artificial Sequence
  Synthetic
augaauggacaaagaacaug

SEQ ID NO: 809260 - RNA, 20 nt, Artificial Sequence
  Synthetic
cgccugugaguaagaacaug

SEQ ID NO: 809261 - RNA, 20 nt, Artificial Sequence
  Synthetic
caccuaugagcgagaacaug

SEQ ID NO: 809262 - RNA, 20 nt, Artificial Sequence
  Synthetic
cacuuauaaaugagaacaug

SEQ ID NO: 809263 - RNA, 20 nt, Artificial Sequence
  Synthetic
cacuuauaagugagaacaug

SEQ ID NO: 809264 - RNA, 20 nt, Artificial Sequence
  Synthetic
cacuuacgagugagaacaug

SEQ ID NO: 809265 - RNA, 20 nt, Artificial Sequence
  Synthetic
caccuaugagugagaacaug

SEQ ID NO: 809266 - RNA, 20 nt, Artificial Sequence
  Synthetic
cacuuaugagugagaacaug

SEQ ID NO: 809267 - RNA, 20 nt, Artificial Sequence
  Synthetic
caccugugagugagaacaug

SEQ ID NO: 809268 - RNA, 20 nt, Artificial Sequence
  Synthetic
ccacaauagaauagaacaug

SEQ ID NO: 809269 - RNA, 20 nt, Artificial Sequence
  Synthetic
uacauaaccauuaacacaug

SEQ ID NO: 809270 - RNA, 20 nt, Artificial Sequence
  Synthetic
uggaaagaaacacacacaug

SEQ ID NO: 809271 - RNA, 20 nt, Artificial Sequence
  Synthetic
auuugugguugucacacaug

SEQ ID NO: 809272 - RNA, 20 nt, Artificial Sequence
  Synthetic
uaaucuaugguagacacaug

SEQ ID NO: 809273 - RNA, 20 nt, Artificial Sequence
  Synthetic
uauucauuuuuuuacacaug

SEQ ID NO: 809274 - RNA, 20 nt, Artificial Sequence
  Synthetic
ugguaguugaugaccacaug

SEQ ID NO: 809275 - RNA, 20 nt, Artificial Sequence
  Synthetic
uaaauuuauauagccacaug

SEQ ID NO: 809276 - RNA, 20 nt, Artificial Sequence
  Synthetic
agacauaugaaugccacaug

SEQ ID NO: 809277 - RNA, 20 nt, Artificial Sequence
  Synthetic
agaaagucagaauccacaug

SEQ ID NO: 809278 - RNA, 20 nt, Artificial Sequence
  Synthetic
uaaauuacagaguccacaug

SEQ ID NO: 809279 - RNA, 20 nt, Artificial Sequence
  Synthetic
ugugauuuucauuccacaug

SEQ ID NO: 809280 - RNA, 20 nt, Artificial Sequence
  Synthetic
uaugugugucucugcacaug

SEQ ID NO: 809281 - RNA, 20 nt, Artificial Sequence
  Synthetic
uauguguugucacucacaug

SEQ ID NO: 809282 - RNA, 20 nt, Artificial Sequence
  Synthetic
agaaaguguuuucucacaug

SEQ ID NO: 809283 - RNA, 20 nt, Artificial Sequence
  Synthetic
ccauaagcagaggucacaug

SEQ ID NO: 809284 - RNA, 20 nt, Artificial Sequence
  Synthetic
ucacugugacuugucacaug

SEQ ID NO: 809285 - RNA, 20 nt, Artificial Sequence
  Synthetic
uauuuuaucaaguucacaug

SEQ ID NO: 809286 - RNA, 20 nt, Artificial Sequence
  Synthetic
uucucaaauaaaaagacaug

SEQ ID NO: 809287 - RNA, 20 nt, Artificial Sequence
  Synthetic
acaaauguuaagcagacaug

SEQ ID NO: 809288 - RNA, 20 nt, Artificial Sequence
  Synthetic
auugauaauugguagacaug

SEQ ID NO: 809289 - RNA, 20 nt, Artificial Sequence
  Synthetic
uacuuuaaauguuagacaug

SEQ ID NO: 809290 - RNA, 20 nt, Artificial Sequence
  Synthetic
caccuaugagugaggacaug

SEQ ID NO: 809291 - RNA, 20 nt, Artificial Sequence
  Synthetic
uuauaaauaaacaugacaug

SEQ ID NO: 809292 - RNA, 20 nt, Artificial Sequence
  Synthetic
uacuaccuggacaugacaug

SEQ ID NO: 809293 - RNA, 20 nt, Artificial Sequence
  Synthetic
uauaauuucacacugacaug

SEQ ID NO: 809294 - RNA, 20 nt, Artificial Sequence
  Synthetic
cuggcuccacccuugacaug

SEQ ID NO: 809295 - RNA, 20 nt, Artificial Sequence
  Synthetic
aggcuguggagcuugacaug

SEQ ID NO: 809296 - RNA, 20 nt, Artificial Sequence
  Synthetic
aaagugacuucaaauacaug

SEQ ID NO: 809297 - RNA, 20 nt, Artificial Sequence
  Synthetic
aaauugaucugcaauacaug

SEQ ID NO: 809298 - RNA, 20 nt, Artificial Sequence
  Synthetic
aaugaggaugagaauacaug

SEQ ID NO: 809299 - RNA, 20 nt, Artificial Sequence
  Synthetic
uuuacuucugugaauacaug

SEQ ID NO: 809300 - RNA, 20 nt, Artificial Sequence
  Synthetic
uaaaugcaaggugcuacaug

SEQ ID NO: 809301 - RNA, 20 nt, Artificial Sequence
  Synthetic
aauagaacaaugucuacaug

SEQ ID NO: 809302 - RNA, 20 nt, Artificial Sequence
  Synthetic
cauauuucaaaaaguacaug

SEQ ID NO: 809303 - RNA, 20 nt, Artificial Sequence
  Synthetic
ucaagccucugaaguacaug

SEQ ID NO: 809304 - RNA, 20 nt, Artificial Sequence
  Synthetic
auaugucaacgggguacaug

SEQ ID NO: 809305 - RNA, 20 nt, Artificial Sequence
  Synthetic
auauauuuacgggguacaug

SEQ ID NO: 809306 - RNA, 20 nt, Artificial Sequence
  Synthetic
ucaugugaucccuguacaug

SEQ ID NO: 809307 - RNA, 20 nt, Artificial Sequence
  Synthetic
aagugcuauuuuauuacaug

SEQ ID NO: 809308 - RNA, 20 nt, Artificial Sequence
  Synthetic
ugcacgcauccacuuacaug

SEQ ID NO: 809309 - RNA, 20 nt, Artificial Sequence
  Synthetic
aggccuuaguggcuuacaug

SEQ ID NO: 809310 - RNA, 20 nt, Artificial Sequence
  Synthetic
uuuugcccacuuuuuacaug

SEQ ID NO: 809311 - RNA, 20 nt, Artificial Sequence
  Synthetic
uggaaaggggugaaaccaug

SEQ ID NO: 809312 - RNA, 20 nt, Artificial Sequence
  Synthetic
cuuagaauaaaacaaccaug

SEQ ID NO: 809313 - RNA, 20 nt, Artificial Sequence
  Synthetic
ccauuaaaauaucaaccaug

SEQ ID NO: 809314 - RNA, 20 nt, Artificial Sequence
  Synthetic
caucuauugagauaaccaug

SEQ ID NO: 809315 - RNA, 20 nt, Artificial Sequence
  Synthetic
uuauaacaaauauaaccaug

SEQ ID NO: 809316 - RNA, 20 nt, Artificial Sequence
  Synthetic
cuguggcccucaccaccaug

SEQ ID NO: 809317 - RNA, 20 nt, Artificial Sequence
  Synthetic
aucacaagaacagcaccaug

SEQ ID NO: 809318 - RNA, 20 nt, Artificial Sequence
  Synthetic
ucccuauuuuuaucaccaug

SEQ ID NO: 809319 - RNA, 20 nt, Artificial Sequence
  Synthetic
ucucuguuugggucaccaug

SEQ ID NO: 809320 - RNA, 20 nt, Artificial Sequence
  Synthetic
auauaagacgaaagaccaug

SEQ ID NO: 809321 - RNA, 20 nt, Artificial Sequence
  Synthetic
aaauaugcuucaagaccaug

SEQ ID NO: 809322 - RNA, 20 nt, Artificial Sequence
  Synthetic
uguuuuguugccagaccaug

SEQ ID NO: 809323 - RNA, 20 nt, Artificial Sequence
  Synthetic
uuauaggucacuggaccaug

SEQ ID NO: 809324 - RNA, 20 nt, Artificial Sequence
  Synthetic
auggagacucaaauaccaug

SEQ ID NO: 809325 - RNA, 20 nt, Artificial Sequence
  Synthetic
uguuuuaaaugcauaccaug

SEQ ID NO: 809326 - RNA, 20 nt, Artificial Sequence
  Synthetic
uggcagguacaauuaccaug

SEQ ID NO: 809327 - RNA, 20 nt, Artificial Sequence
  Synthetic
uugaagagguuucacccaug

SEQ ID NO: 809328 - RNA, 20 nt, Artificial Sequence
  Synthetic
uugacucucuuggccccaug

SEQ ID NO: 809329 - RNA, 20 nt, Artificial Sequence
  Synthetic
aauuaaaccaugaagccaug

SEQ ID NO: 809330 - RNA, 20 nt, Artificial Sequence
  Synthetic
cggaggccucugaagccaug

SEQ ID NO: 809331 - RNA, 20 nt, Artificial Sequence
  Synthetic
cugaggccuacccagccaug

SEQ ID NO: 809332 - RNA, 20 nt, Artificial Sequence
  Synthetic
cugaggccuccccagccaug

SEQ ID NO: 809333 - RNA, 20 nt, Artificial Sequence
  Synthetic
cuuugucuacaagagccaug

SEQ ID NO: 809334 - RNA, 20 nt, Artificial Sequence
  Synthetic
cccuaguguagcuagccaug

SEQ ID NO: 809335 - RNA, 20 nt, Artificial Sequence
  Synthetic
aaaguauuggcuaggccaug

SEQ ID NO: 809336 - RNA, 20 nt, Artificial Sequence
  Synthetic
uaaguggugauuaggccaug

SEQ ID NO: 809337 - RNA, 20 nt, Artificial Sequence
  Synthetic
uuguuucaaacacggccaug

SEQ ID NO: 809338 - RNA, 20 nt, Artificial Sequence
  Synthetic
cuuuacauaucuuggccaug

SEQ ID NO: 809339 - RNA, 20 nt, Artificial Sequence
  Synthetic
aaauuaaucuaaaugccaug

SEQ ID NO: 809340 - RNA, 20 nt, Artificial Sequence
  Synthetic
uaagcauaguaccugccaug

SEQ ID NO: 809341 - RNA, 20 nt, Artificial Sequence
  Synthetic
ccacauuuuuuuuugccaug

SEQ ID NO: 809342 - RNA, 20 nt, Artificial Sequence
  Synthetic
ccuaauaagauaaauccaug

SEQ ID NO: 809343 - RNA, 20 nt, Artificial Sequence
  Synthetic
uucugaucucugaauccaug

SEQ ID NO: 809344 - RNA, 20 nt, Artificial Sequence
  Synthetic
cuauuacaagauaauccaug

SEQ ID NO: 809345 - RNA, 20 nt, Artificial Sequence
  Synthetic
uagaauauauuuaauccaug

SEQ ID NO: 809346 - RNA, 20 nt, Artificial Sequence
  Synthetic
uguacuaugacacauccaug

SEQ ID NO: 809347 - RNA, 20 nt, Artificial Sequence
  Synthetic
ucuaaccauucacauccaug

SEQ ID NO: 809348 - RNA, 20 nt, Artificial Sequence
  Synthetic
caucuuuacuuacauccaug

SEQ ID NO: 809349 - RNA, 20 nt, Artificial Sequence
  Synthetic
caacaacaagugcauccaug

SEQ ID NO: 809350 - RNA, 20 nt, Artificial Sequence
  Synthetic
ucucuuucaugucauccaug

SEQ ID NO: 809351 - RNA, 20 nt, Artificial Sequence
  Synthetic
auugucccucaguauccaug

SEQ ID NO: 809352 - RNA, 20 nt, Artificial Sequence
  Synthetic
aagacuggucauuauccaug

SEQ ID NO: 809353 - RNA, 20 nt, Artificial Sequence
  Synthetic
cauuuauugugagcuccaug

SEQ ID NO: 809354 - RNA, 20 nt, Artificial Sequence
  Synthetic
ccuagccgagguucuccaug

SEQ ID NO: 809355 - RNA, 20 nt, Artificial Sequence
  Synthetic
auugagacuauuucuccaug

SEQ ID NO: 809356 - RNA, 20 nt, Artificial Sequence
  Synthetic
uccucccccguuucuccaug

SEQ ID NO: 809357 - RNA, 20 nt, Artificial Sequence
  Synthetic
aaucggauguaagguccaug

SEQ ID NO: 809358 - RNA, 20 nt, Artificial Sequence
  Synthetic
ugcagcccuaaaauuccaug

SEQ ID NO: 809359 - RNA, 20 nt, Artificial Sequence
  Synthetic
aucacaauauaaauuccaug

SEQ ID NO: 809360 - RNA, 20 nt, Artificial Sequence
  Synthetic
auaagucugacaauuccaug

SEQ ID NO: 809361 - RNA, 20 nt, Artificial Sequence
  Synthetic
uugagauugcaacuuccaug

SEQ ID NO: 809362 - RNA, 20 nt, Artificial Sequence
  Synthetic
aagauuuggcagcuuccaug

SEQ ID NO: 809363 - RNA, 20 nt, Artificial Sequence
  Synthetic
aucuugucacuucuuccaug

SEQ ID NO: 809364 - RNA, 20 nt, Artificial Sequence
  Synthetic
ugguaaguuucaguuccaug

SEQ ID NO: 809365 - RNA, 20 nt, Artificial Sequence
  Synthetic
ugugucagugaguuuccaug

SEQ ID NO: 809366 - RNA, 20 nt, Artificial Sequence
  Synthetic
caauacccauauuuuccaug

SEQ ID NO: 809367 - RNA, 20 nt, Artificial Sequence
  Synthetic
cagcagagagguuuuccaug

SEQ ID NO: 809368 - RNA, 20 nt, Artificial Sequence
  Synthetic
uccgcaccugacaaagcaug

SEQ ID NO: 809369 - RNA, 20 nt, Artificial Sequence
  Synthetic
uuauuggaauacuaagcaug

SEQ ID NO: 809370 - RNA, 20 nt, Artificial Sequence
  Synthetic
caguguugcauguaagcaug

SEQ ID NO: 809371 - RNA, 20 nt, Artificial Sequence
  Synthetic
ucacaugggaaaacagcaug

SEQ ID NO: 809372 - RNA, 20 nt, Artificial Sequence
  Synthetic
acuaucacgacaacagcaug

SEQ ID NO: 809373 - RNA, 20 nt, Artificial Sequence
  Synthetic
acugucacaagaacagcaug

SEQ ID NO: 809374 - RNA, 20 nt, Artificial Sequence
  Synthetic
acuaucaugagaacagcaug

SEQ ID NO: 809375 - RNA, 20 nt, Artificial Sequence
  Synthetic
uuccagugggggacagcaug

SEQ ID NO: 809376 - RNA, 20 nt, Artificial Sequence
  Synthetic
acccuacaauguccagcaug

SEQ ID NO: 809377 - RNA, 20 nt, Artificial Sequence
  Synthetic
uuuacauuuucagcagcaug

SEQ ID NO: 809378 - RNA, 20 nt, Artificial Sequence
  Synthetic
auggcgaacaggagagcaug

SEQ ID NO: 809379 - RNA, 20 nt, Artificial Sequence
  Synthetic
cccacagugggaggagcaug

SEQ ID NO: 809380 - RNA, 20 nt, Artificial Sequence
  Synthetic
uuuuauccugaaugagcaug

SEQ ID NO: 809381 - RNA, 20 nt, Artificial Sequence
  Synthetic
auagaaaguuaaauagcaug

SEQ ID NO: 809382 - RNA, 20 nt, Artificial Sequence
  Synthetic
acuaucaugagaauagcaug

SEQ ID NO: 809383 - RNA, 20 nt, Artificial Sequence
  Synthetic
aagccauccugggacgcaug

SEQ ID NO: 809384 - RNA, 20 nt, Artificial Sequence
  Synthetic
uaaauuucaaaagccgcaug

SEQ ID NO: 809385 - RNA, 20 nt, Artificial Sequence
  Synthetic
ugacaaccacuagccgcaug

SEQ ID NO: 809386 - RNA, 20 nt, Artificial Sequence
  Synthetic
aggaaagagagagaggcaug

SEQ ID NO: 809387 - RNA, 20 nt, Artificial Sequence
  Synthetic
uacuuuuaugacgaggcaug

SEQ ID NO: 809388 - RNA, 20 nt, Artificial Sequence
  Synthetic
aucucaaagaaugaggcaug

SEQ ID NO: 809389 - RNA, 20 nt, Artificial Sequence
  Synthetic
auuagauguugguaggcaug

SEQ ID NO: 809390 - RNA, 20 nt, Artificial Sequence
  Synthetic
caccacugcacuccggcaug

SEQ ID NO: 809391 - RNA, 20 nt, Artificial Sequence
  Synthetic
acguauuuuuaaagggcaug

SEQ ID NO: 809392 - RNA, 20 nt, Artificial Sequence
  Synthetic
acagaaucucagagggcaug

SEQ ID NO: 809393 - RNA, 20 nt, Artificial Sequence
  Synthetic
agcaugccuuucugggcaug

SEQ ID NO: 809394 - RNA, 20 nt, Artificial Sequence
  Synthetic
ucagagacuuuaguggcaug

SEQ ID NO: 809395 - RNA, 20 nt, Artificial Sequence
  Synthetic
ucugauaauuacuuggcaug

SEQ ID NO: 809396 - RNA, 20 nt, Artificial Sequence
  Synthetic
acucagccaggaaaugcaug

SEQ ID NO: 809397 - RNA, 20 nt, Artificial Sequence
  Synthetic
augugauguaauaaugcaug

SEQ ID NO: 809398 - RNA, 20 nt, Artificial Sequence
  Synthetic
auuuucucugaacaugcaug

SEQ ID NO: 809399 - RNA, 20 nt, Artificial Sequence
  Synthetic
ucugauucagaucaugcaug

SEQ ID NO: 809400 - RNA, 20 nt, Artificial Sequence
  Synthetic
uauucuagggacuaugcaug

SEQ ID NO: 809401 - RNA, 20 nt, Artificial Sequence
  Synthetic
uuugccaguacaacugcaug

SEQ ID NO: 809402 - RNA, 20 nt, Artificial Sequence
  Synthetic
aucauacaaaggucugcaug

SEQ ID NO: 809403 - RNA, 20 nt, Artificial Sequence
  Synthetic
aagucucagcauucugcaug

SEQ ID NO: 809404 - RNA, 20 nt, Artificial Sequence
  Synthetic
aagguggugacaggugcaug

SEQ ID NO: 809405 - RNA, 20 nt, Artificial Sequence
  Synthetic
uuggauuuaagacuugcaug

SEQ ID NO: 809406 - RNA, 20 nt, Artificial Sequence
  Synthetic
uguaauuuguaccuugcaug

SEQ ID NO: 809407 - RNA, 20 nt, Artificial Sequence
  Synthetic
aacagcuaaaaucuugcaug

SEQ ID NO: 809408 - RNA, 20 nt, Artificial Sequence
  Synthetic
aagggguaaaucuuugcaug

SEQ ID NO: 809409 - RNA, 20 nt, Artificial Sequence
  Synthetic
aauugggucucuuuugcaug

SEQ ID NO: 809410 - RNA, 20 nt, Artificial Sequence
  Synthetic
uucuuuaauauuuuugcaug

SEQ ID NO: 809411 - RNA, 20 nt, Artificial Sequence
  Synthetic
uuccaaccuguuuuugcaug

SEQ ID NO: 809412 - RNA, 20 nt, Artificial Sequence
  Synthetic
uucaaugucuuaaaaucaug

SEQ ID NO: 809413 - RNA, 20 nt, Artificial Sequence
  Synthetic
caaugacaccacaaaucaug

SEQ ID NO: 809414 - RNA, 20 nt, Artificial Sequence
  Synthetic
auuaaaacuuacaaaucaug

SEQ ID NO: 809415 - RNA, 20 nt, Artificial Sequence
  Synthetic
aucugauuccauaaaucaug

SEQ ID NO: 809416 - RNA, 20 nt, Artificial Sequence
  Synthetic
acuuugagggaacaaucaug

SEQ ID NO: 809417 - RNA, 20 nt, Artificial Sequence
  Synthetic
auguaauauauagaaucaug

SEQ ID NO: 809418 - RNA, 20 nt, Artificial Sequence
  Synthetic
agauaaaugauggaaucaug

SEQ ID NO: 809419 - RNA, 20 nt, Artificial Sequence
  Synthetic
ugggagguaacugaaucaug

SEQ ID NO: 809420 - RNA, 20 nt, Artificial Sequence
  Synthetic
ugggagguaauugaaucaug

SEQ ID NO: 809421 - RNA, 20 nt, Artificial Sequence
  Synthetic
caucuauugagauaaucaug

SEQ ID NO: 809422 - RNA, 20 nt, Artificial Sequence
  Synthetic
cuucuauugagauaaucaug

SEQ ID NO: 809423 - RNA, 20 nt, Artificial Sequence
  Synthetic
ugggagguaauuuaaucaug

SEQ ID NO: 809424 - RNA, 20 nt, Artificial Sequence
  Synthetic
cuucaggaaaacacaucaug

SEQ ID NO: 809425 - RNA, 20 nt, Artificial Sequence
  Synthetic
cacauuuaagugacaucaug

SEQ ID NO: 809426 - RNA, 20 nt, Artificial Sequence
  Synthetic
aagauauaauauacaucaug

SEQ ID NO: 809427 - RNA, 20 nt, Artificial Sequence
  Synthetic
uaagaggugauugcaucaug

SEQ ID NO: 809428 - RNA, 20 nt, Artificial Sequence
  Synthetic
caucaucagccaucaucaug

SEQ ID NO: 809429 - RNA, 20 nt, Artificial Sequence
  Synthetic
agaacucacucaucaucaug

SEQ ID NO: 809430 - RNA, 20 nt, Artificial Sequence
  Synthetic
cuauauuacauuucaucaug

SEQ ID NO: 809431 - RNA, 20 nt, Artificial Sequence
  Synthetic
ugggaggugauuggaucaug

SEQ ID NO: 809432 - RNA, 20 nt, Artificial Sequence
  Synthetic
auuggcaauugaugaucaug

SEQ ID NO: 809433 - RNA, 20 nt, Artificial Sequence
  Synthetic
ucauuauuaaacugaucaug

SEQ ID NO: 809434 - RNA, 20 nt, Artificial Sequence
  Synthetic
agaacucagcugcuaucaug

SEQ ID NO: 809435 - RNA, 20 nt, Artificial Sequence
  Synthetic
agcaugaaaaaauuaucaug

SEQ ID NO: 809436 - RNA, 20 nt, Artificial Sequence
  Synthetic
uggcaauaauucuuaucaug

SEQ ID NO: 809437 - RNA, 20 nt, Artificial Sequence
  Synthetic
auucauaguucuuuaucaug

SEQ ID NO: 809438 - RNA, 20 nt, Artificial Sequence
  Synthetic
aacugcaaaaggaccucaug

SEQ ID NO: 809439 - RNA, 20 nt, Artificial Sequence
  Synthetic
acuucuauuagagccucaug

SEQ ID NO: 809440 - RNA, 20 nt, Artificial Sequence
  Synthetic
ucaucuucauuggccucaug

SEQ ID NO: 809441 - RNA, 20 nt, Artificial Sequence
  Synthetic
aacaaaaugugaagcucaug

SEQ ID NO: 809442 - RNA, 20 nt, Artificial Sequence
  Synthetic
aggcaagacaguggcucaug

SEQ ID NO: 809443 - RNA, 20 nt, Artificial Sequence
  Synthetic
ucuaccacaauaugcucaug

SEQ ID NO: 809444 - RNA, 20 nt, Artificial Sequence
  Synthetic
auggugcugggcugcucaug

SEQ ID NO: 809445 - RNA, 20 nt, Artificial Sequence
  Synthetic
uuagagccuuuuugcucaug

SEQ ID NO: 809446 - RNA, 20 nt, Artificial Sequence
  Synthetic
ucugaucuuuccaucucaug

SEQ ID NO: 809447 - RNA, 20 nt, Artificial Sequence
  Synthetic
aaaaccaugucuaucucaug

SEQ ID NO: 809448 - RNA, 20 nt, Artificial Sequence
  Synthetic
aacugugacccauucucaug

SEQ ID NO: 809449 - RNA, 20 nt, Artificial Sequence
  Synthetic
agagcauuuauauucucaug

SEQ ID NO: 809450 - RNA, 20 nt, Artificial Sequence
  Synthetic
accacuaccaacuucucaug

SEQ ID NO: 809451 - RNA, 20 nt, Artificial Sequence
  Synthetic
ccuuucucauccuucucaug

SEQ ID NO: 809452 - RNA, 20 nt, Artificial Sequence
  Synthetic
aaauaccacguguucucaug

SEQ ID NO: 809453 - RNA, 20 nt, Artificial Sequence
  Synthetic
cugaggccuccccagucaug

SEQ ID NO: 809454 - RNA, 20 nt, Artificial Sequence
  Synthetic
aucccguggauucagucaug

SEQ ID NO: 809455 - RNA, 20 nt, Artificial Sequence
  Synthetic
uggugucucccuaggucaug

SEQ ID NO: 809456 - RNA, 20 nt, Artificial Sequence
  Synthetic
acgggaaguguggggucaug

SEQ ID NO: 809457 - RNA, 20 nt, Artificial Sequence
  Synthetic
uuucugcuuuaugggucaug

SEQ ID NO: 809458 - RNA, 20 nt, Artificial Sequence
  Synthetic
cgggagguuuuugggucaug

SEQ ID NO: 809459 - RNA, 20 nt, Artificial Sequence
  Synthetic
auagguaaacucaugucaug

SEQ ID NO: 809460 - RNA, 20 nt, Artificial Sequence
  Synthetic
auaaaaccggagaugucaug

SEQ ID NO: 809461 - RNA, 20 nt, Artificial Sequence
  Synthetic
cuauagcuuuugaugucaug

SEQ ID NO: 809462 - RNA, 20 nt, Artificial Sequence
  Synthetic
ugguucucucaucugucaug

SEQ ID NO: 809463 - RNA, 20 nt, Artificial Sequence
  Synthetic
cagggucucacucugucaug

SEQ ID NO: 809464 - RNA, 20 nt, Artificial Sequence
  Synthetic
auagguaaacuugugucaug

SEQ ID NO: 809465 - RNA, 20 nt, Artificial Sequence
  Synthetic
aaagauacccaauauucaug

SEQ ID NO: 809466 - RNA, 20 nt, Artificial Sequence
  Synthetic
uuccccuuccuguauucaug

SEQ ID NO: 809467 - RNA, 20 nt, Artificial Sequence
  Synthetic
uguucaguacagccuucaug

SEQ ID NO: 809468 - RNA, 20 nt, Artificial Sequence
  Synthetic
acuaaaccaaauccuucaug

SEQ ID NO: 809469 - RNA, 20 nt, Artificial Sequence
  Synthetic
ucaauacugccugcuucaug

SEQ ID NO: 809470 - RNA, 20 nt, Artificial Sequence
  Synthetic
aacaccauauccucuucaug

SEQ ID NO: 809471 - RNA, 20 nt, Artificial Sequence
  Synthetic
acugucaguuuuucuucaug

SEQ ID NO: 809472 - RNA, 20 nt, Artificial Sequence
  Synthetic
aggaguuauuuagguucaug

SEQ ID NO: 809473 - RNA, 20 nt, Artificial Sequence
  Synthetic
aaagauaacaaguguucaug

SEQ ID NO: 809474 - RNA, 20 nt, Artificial Sequence
  Synthetic
ccuuuugaaguuuguucaug

SEQ ID NO: 809475 - RNA, 20 nt, Artificial Sequence
  Synthetic
ccagcagagguuuguucaug

SEQ ID NO: 809476 - RNA, 20 nt, Artificial Sequence
  Synthetic
uucaauuacucaauuucaug

SEQ ID NO: 809477 - RNA, 20 nt, Artificial Sequence
  Synthetic
agaacucacucauuuucaug

SEQ ID NO: 809478 - RNA, 20 nt, Artificial Sequence
  Synthetic
uuaaccaaaauauuuucaug

SEQ ID NO: 809479 - RNA, 20 nt, Artificial Sequence
  Synthetic
ucuguaguuuucuuuucaug

SEQ ID NO: 809480 - RNA, 20 nt, Artificial Sequence
  Synthetic
uuguuuuuuauaaaaagaug

SEQ ID NO: 809481 - RNA, 20 nt, Artificial Sequence
  Synthetic
acauuagguaggaaaagaug

SEQ ID NO: 809482 - RNA, 20 nt, Artificial Sequence
  Synthetic
uuuuuaguauggaaaagaug

SEQ ID NO: 809483 - RNA, 20 nt, Artificial Sequence
  Synthetic
caggaagaauggcaaagaug

SEQ ID NO: 809484 - RNA, 20 nt, Artificial Sequence
  Synthetic
uuaguauaacuucaaagaug

SEQ ID NO: 809485 - RNA, 20 nt, Artificial Sequence
  Synthetic
ugugggcuggcagaaagaug

SEQ ID NO: 809486 - RNA, 20 nt, Artificial Sequence
  Synthetic
aaugaaguuagagaaagaug

SEQ ID NO: 809487 - RNA, 20 nt, Artificial Sequence
  Synthetic
uucuauuuggaggaaagaug

SEQ ID NO: 809488 - RNA, 20 nt, Artificial Sequence
  Synthetic
ugguuuuggguguaaagaug

SEQ ID NO: 809489 - RNA, 20 nt, Artificial Sequence
  Synthetic
aaauugauuuuuuaaagaug

SEQ ID NO: 809490 - RNA, 20 nt, Artificial Sequence
  Synthetic
augauuuacaagacaagaug

SEQ ID NO: 809491 - RNA, 20 nt, Artificial Sequence
  Synthetic
cauagaggaaaaagaagaug

SEQ ID NO: 809492 - RNA, 20 nt, Artificial Sequence
  Synthetic
cuggcuuagagaagaagaug

SEQ ID NO: 809493 - RNA, 20 nt, Artificial Sequence
  Synthetic
aacugaugcuggagaagaug

SEQ ID NO: 809494 - RNA, 20 nt, Artificial Sequence
  Synthetic
uagauaaauccacgaagaug

SEQ ID NO: 809495 - RNA, 20 nt, Artificial Sequence
  Synthetic
cauauuuugggaggaagaug

SEQ ID NO: 809496 - RNA, 20 nt, Artificial Sequence
  Synthetic
ugaaagugucagggaagaug

SEQ ID NO: 809497 - RNA, 20 nt, Artificial Sequence
  Synthetic
uuuguauuaaggggaagaug

SEQ ID NO: 809498 - RNA, 20 nt, Artificial Sequence
  Synthetic
uagaagcuuaggggaagaug

SEQ ID NO: 809499 - RNA, 20 nt, Artificial Sequence
  Synthetic
aucaggugcuggggaagaug

SEQ ID NO: 809500 - RNA, 20 nt, Artificial Sequence
  Synthetic
uucuucuuuuauugaagaug

SEQ ID NO: 809501 - RNA, 20 nt, Artificial Sequence
  Synthetic
agauaagagucuugaagaug

SEQ ID NO: 809502 - RNA, 20 nt, Artificial Sequence
  Synthetic
uguaagcccaucauaagaug

SEQ ID NO: 809503 - RNA, 20 nt, Artificial Sequence
  Synthetic
cuaauucagaaacuaagaug

SEQ ID NO: 809504 - RNA, 20 nt, Artificial Sequence
  Synthetic
aggugaccuggccuaagaug

SEQ ID NO: 809505 - RNA, 20 nt, Artificial Sequence
  Synthetic
uaguaagccagaguaagaug

SEQ ID NO: 809506 - RNA, 20 nt, Artificial Sequence
  Synthetic
agauacccuuuauuaagaug

SEQ ID NO: 809507 - RNA, 20 nt, Artificial Sequence
  Synthetic
ugugugcuuucuuuaagaug

SEQ ID NO: 809508 - RNA, 20 nt, Artificial Sequence
  Synthetic
cccauuacaagccacagaug

SEQ ID NO: 809509 - RNA, 20 nt, Artificial Sequence
  Synthetic
cucaaaaaauuucacagaug

SEQ ID NO: 809510 - RNA, 20 nt, Artificial Sequence
  Synthetic
uuaaucuuauuucacagaug

SEQ ID NO: 809511 - RNA, 20 nt, Artificial Sequence
  Synthetic
aauacugauuaagacagaug

SEQ ID NO: 809512 - RNA, 20 nt, Artificial Sequence
  Synthetic
uaauagaucucuuacagaug

SEQ ID NO: 809513 - RNA, 20 nt, Artificial Sequence
  Synthetic
ugaauugacaguuacagaug

SEQ ID NO: 809514 - RNA, 20 nt, Artificial Sequence
  Synthetic
acuuguuuaaaaaccagaug

SEQ ID NO: 809515 - RNA, 20 nt, Artificial Sequence
  Synthetic
ugugaagucuagaccagaug

SEQ ID NO: 809516 - RNA, 20 nt, Artificial Sequence
  Synthetic
aaaaaaaaaaaggccagaug

SEQ ID NO: 809517 - RNA, 20 nt, Artificial Sequence
  Synthetic
uuuagauaaauauccagaug

SEQ ID NO: 809518 - RNA, 20 nt, Artificial Sequence
  Synthetic
auaaaauaaugcuccagaug

SEQ ID NO: 809519 - RNA, 20 nt, Artificial Sequence
  Synthetic
aauccacagugguccagaug

SEQ ID NO: 809520 - RNA, 20 nt, Artificial Sequence
  Synthetic
cguaaaguuauuuccagaug

SEQ ID NO: 809521 - RNA, 20 nt, Artificial Sequence
  Synthetic
cuguauuuugggagcagaug

SEQ ID NO: 809522 - RNA, 20 nt, Artificial Sequence
  Synthetic
acuuaauggaagggcagaug

SEQ ID NO: 809523 - RNA, 20 nt, Artificial Sequence
  Synthetic
acuuacaaucauggcagaug

SEQ ID NO: 809524 - RNA, 20 nt, Artificial Sequence
  Synthetic
ucagguaaauauggcagaug

SEQ ID NO: 809525 - RNA, 20 nt, Artificial Sequence
  Synthetic
agaagaagucacugcagaug

SEQ ID NO: 809526 - RNA, 20 nt, Artificial Sequence
  Synthetic
caaaaguaaguuugcagaug

SEQ ID NO: 809527 - RNA, 20 nt, Artificial Sequence
  Synthetic
aacuauccauuuugcagaug

SEQ ID NO: 809528 - RNA, 20 nt, Artificial Sequence
  Synthetic
agauaaacaucaaucagaug

SEQ ID NO: 809529 - RNA, 20 nt, Artificial Sequence
  Synthetic
cucauuuuuagcaucagaug

SEQ ID NO: 809530 - RNA, 20 nt, Artificial Sequence
  Synthetic
cugcugugaucucucagaug

SEQ ID NO: 809531 - RNA, 20 nt, Artificial Sequence
  Synthetic
ccauucccgggucucagaug

SEQ ID NO: 809532 - RNA, 20 nt, Artificial Sequence
  Synthetic
auguuggugaccuucagaug

SEQ ID NO: 809533 - RNA, 20 nt, Artificial Sequence
  Synthetic
cacuaaauagcuuucagaug

SEQ ID NO: 809534 - RNA, 20 nt, Artificial Sequence
  Synthetic
uggaaggguagaaagagaug

SEQ ID NO: 809535 - RNA, 20 nt, Artificial Sequence
  Synthetic
cagcccagauucaagagaug

SEQ ID NO: 809536 - RNA, 20 nt, Artificial Sequence
  Synthetic
augagaucacagaagagaug

SEQ ID NO: 809537 - RNA, 20 nt, Artificial Sequence
  Synthetic
uuguauuuuuagaagagaug

SEQ ID NO: 809538 - RNA, 20 nt, Artificial Sequence
  Synthetic
agaggagaacuacagagaug

SEQ ID NO: 809539 - RNA, 20 nt, Artificial Sequence
  Synthetic
uuguauuuuuagcagagaug

SEQ ID NO: 809540 - RNA, 20 nt, Artificial Sequence
  Synthetic
agaaguuugcugcagagaug

SEQ ID NO: 809541 - RNA, 20 nt, Artificial Sequence
  Synthetic
uguauuuuuuugcagagaug

SEQ ID NO: 809542 - RNA, 20 nt, Artificial Sequence
  Synthetic
cagcacggucuucagagaug

SEQ ID NO: 809543 - RNA, 20 nt, Artificial Sequence
  Synthetic
cagagaucagaagagagaug

SEQ ID NO: 809544 - RNA, 20 nt, Artificial Sequence
  Synthetic
caaggagaggaagagagaug

SEQ ID NO: 809545 - RNA, 20 nt, Artificial Sequence
  Synthetic
uuugacaaugcugagagaug

SEQ ID NO: 809546 - RNA, 20 nt, Artificial Sequence
  Synthetic
uguguauagaaauagagaug

SEQ ID NO: 809547 - RNA, 20 nt, Artificial Sequence
  Synthetic
uaccuagcaagcuagagaug

SEQ ID NO: 809548 - RNA, 20 nt, Artificial Sequence
  Synthetic
uuguauuuucaguagagaug

SEQ ID NO: 809549 - RNA, 20 nt, Artificial Sequence
  Synthetic
uuuuauuuucaguagagaug

SEQ ID NO: 809550 - RNA, 20 nt, Artificial Sequence
  Synthetic
uuguaucuuuaguagagaug

SEQ ID NO: 809551 - RNA, 20 nt, Artificial Sequence
  Synthetic
ucauauuuuuaguagagaug

SEQ ID NO: 809552 - RNA, 20 nt, Artificial Sequence
  Synthetic
uuauauuuuuaguagagaug

SEQ ID NO: 809553 - RNA, 20 nt, Artificial Sequence
  Synthetic
uucuauuuuuaguagagaug

SEQ ID NO: 809554 - RNA, 20 nt, Artificial Sequence
  Synthetic
ugguauuuuuaguagagaug

SEQ ID NO: 809555 - RNA, 20 nt, Artificial Sequence
  Synthetic
uuguauuuuuaguagagaug

SEQ ID NO: 809556 - RNA, 20 nt, Artificial Sequence
  Synthetic
uuuuauuuuuaguagagaug

SEQ ID NO: 809557 - RNA, 20 nt, Artificial Sequence
  Synthetic
uuguguuuuuaguagagaug

SEQ ID NO: 809558 - RNA, 20 nt, Artificial Sequence
  Synthetic
uggauuuuuuaguagagaug

SEQ ID NO: 809559 - RNA, 20 nt, Artificial Sequence
  Synthetic
uguauuuuuuaguagagaug

SEQ ID NO: 809560 - RNA, 20 nt, Artificial Sequence
  Synthetic
uugaauucuuuguagagaug

SEQ ID NO: 809561 - RNA, 20 nt, Artificial Sequence
  Synthetic
cuaucuauuuuguagagaug

SEQ ID NO: 809562 - RNA, 20 nt, Artificial Sequence
  Synthetic
uugcauuuuuuguagagaug

SEQ ID NO: 809563 - RNA, 20 nt, Artificial Sequence
  Synthetic
cacagagaagauuagagaug

SEQ ID NO: 809564 - RNA, 20 nt, Artificial Sequence
  Synthetic
aaggcaacagagacgagaug

SEQ ID NO: 809565 - RNA, 20 nt, Artificial Sequence
  Synthetic
aaagcuauucuggggagaug

SEQ ID NO: 809566 - RNA, 20 nt, Artificial Sequence
  Synthetic
auccucgggguggggagaug

SEQ ID NO: 809567 - RNA, 20 nt, Artificial Sequence
  Synthetic
caguugaugaaauggagaug

SEQ ID NO: 809568 - RNA, 20 nt, Artificial Sequence
  Synthetic
cauucaaaagcaaugagaug

SEQ ID NO: 809569 - RNA, 20 nt, Artificial Sequence
  Synthetic
aagguuuccuggaugagaug

SEQ ID NO: 809570 - RNA, 20 nt, Artificial Sequence
  Synthetic
aucuuuccaggacugagaug

SEQ ID NO: 809571 - RNA, 20 nt, Artificial Sequence
  Synthetic
uuucaaagaaagcugagaug

SEQ ID NO: 809572 - RNA, 20 nt, Artificial Sequence
  Synthetic
auuucuuaccagcugagaug

SEQ ID NO: 809573 - RNA, 20 nt, Artificial Sequence
  Synthetic
aagcaggugacuuugagaug

SEQ ID NO: 809574 - RNA, 20 nt, Artificial Sequence
  Synthetic
cuuuauuuguuuuugagaug

SEQ ID NO: 809575 - RNA, 20 nt, Artificial Sequence
  Synthetic
agacccuaauaaaauagaug

SEQ ID NO: 809576 - RNA, 20 nt, Artificial Sequence
  Synthetic
auacuacugugaaauagaug

SEQ ID NO: 809577 - RNA, 20 nt, Artificial Sequence
  Synthetic
agaagcagaauuuauagaug

SEQ ID NO: 809578 - RNA, 20 nt, Artificial Sequence
  Synthetic
ucaugaacaguuuauagaug

SEQ ID NO: 809579 - RNA, 20 nt, Artificial Sequence
  Synthetic
caucucuggaaaccuagaug

SEQ ID NO: 809580 - RNA, 20 nt, Artificial Sequence
  Synthetic
uuuggggaagucucuagaug

SEQ ID NO: 809581 - RNA, 20 nt, Artificial Sequence
  Synthetic
uggaagaaaacaaguagaug

SEQ ID NO: 809582 - RNA, 20 nt, Artificial Sequence
  Synthetic
auaccgcggacuaguagaug

SEQ ID NO: 809583 - RNA, 20 nt, Artificial Sequence
  Synthetic
agcaccuuaggagguagaug

SEQ ID NO: 809584 - RNA, 20 nt, Artificial Sequence
  Synthetic
uaaaaguauguguguagaug

SEQ ID NO: 809585 - RNA, 20 nt, Artificial Sequence
  Synthetic
aggaaagacaugauuagaug

SEQ ID NO: 809586 - RNA, 20 nt, Artificial Sequence
  Synthetic
ccccacuugcagcuuagaug

SEQ ID NO: 809587 - RNA, 20 nt, Artificial Sequence
  Synthetic
aguagauguggaaaacgaug

SEQ ID NO: 809588 - RNA, 20 nt, Artificial Sequence
  Synthetic
uacaucuguuagaaacgaug

SEQ ID NO: 809589 - RNA, 20 nt, Artificial Sequence
  Synthetic
uuucuacacuuuacacgaug

SEQ ID NO: 809590 - RNA, 20 nt, Artificial Sequence
  Synthetic
aaucauuugagcccacgaug

SEQ ID NO: 809591 - RNA, 20 nt, Artificial Sequence
  Synthetic
agcgcuuagggaggccgaug

SEQ ID NO: 809592 - RNA, 20 nt, Artificial Sequence
  Synthetic
aggguucagaaaaggcgaug

SEQ ID NO: 809593 - RNA, 20 nt, Artificial Sequence
  Synthetic
ucaggauugacuuggcgaug

SEQ ID NO: 809594 - RNA, 20 nt, Artificial Sequence
  Synthetic
uuaggauugacuuggcgaug

SEQ ID NO: 809595 - RNA, 20 nt, Artificial Sequence
  Synthetic
agugggguugggugucgaug

SEQ ID NO: 809596 - RNA, 20 nt, Artificial Sequence
  Synthetic
cccagaaacugaauucgaug

SEQ ID NO: 809597 - RNA, 20 nt, Artificial Sequence
  Synthetic
auggcuuuaugcuuucgaug

SEQ ID NO: 809598 - RNA, 20 nt, Artificial Sequence
  Synthetic
ccuuggccgacuuuucgaug

SEQ ID NO: 809599 - RNA, 20 nt, Artificial Sequence
  Synthetic
accgugcugcccaaaggaug

SEQ ID NO: 809600 - RNA, 20 nt, Artificial Sequence
  Synthetic
ucaaagugagugaaaggaug

SEQ ID NO: 809601 - RNA, 20 nt, Artificial Sequence
  Synthetic
uuguauuaaggccaaggaug

SEQ ID NO: 809602 - RNA, 20 nt, Artificial Sequence
  Synthetic
accagaugcuagcaaggaug

SEQ ID NO: 809603 - RNA, 20 nt, Artificial Sequence
  Synthetic
aacaugugcuggcaaggaug

SEQ ID NO: 809604 - RNA, 20 nt, Artificial Sequence
  Synthetic
uguuguauucugcaaggaug

SEQ ID NO: 809605 - RNA, 20 nt, Artificial Sequence
  Synthetic
uagaguuuuaaagaaggaug

SEQ ID NO: 809606 - RNA, 20 nt, Artificial Sequence
  Synthetic
uuucaauaaagugaaggaug

SEQ ID NO: 809607 - RNA, 20 nt, Artificial Sequence
  Synthetic
uacaaacugaauuaaggaug

SEQ ID NO: 809608 - RNA, 20 nt, Artificial Sequence
  Synthetic
cccaccauuuuaagaggaug

SEQ ID NO: 809609 - RNA, 20 nt, Artificial Sequence
  Synthetic
aacagaugcuggagaggaug

SEQ ID NO: 809610 - RNA, 20 nt, Artificial Sequence
  Synthetic
aacaggugcuggagaggaug

SEQ ID NO: 809611 - RNA, 20 nt, Artificial Sequence
  Synthetic
cccagcacuuugggaggaug

SEQ ID NO: 809612 - RNA, 20 nt, Artificial Sequence
  Synthetic
uaguauugugaaugaggaug

SEQ ID NO: 809613 - RNA, 20 nt, Artificial Sequence
  Synthetic
uucuaaaagaccugaggaug

SEQ ID NO: 809614 - RNA, 20 nt, Artificial Sequence
  Synthetic
aacaggugcuggugaggaug

SEQ ID NO: 809615 - RNA, 20 nt, Artificial Sequence
  Synthetic
ugagggcccacuugaggaug

SEQ ID NO: 809616 - RNA, 20 nt, Artificial Sequence
  Synthetic
agcucagccacaguaggaug

SEQ ID NO: 809617 - RNA, 20 nt, Artificial Sequence
  Synthetic
uuguggcuauauguaggaug

SEQ ID NO: 809618 - RNA, 20 nt, Artificial Sequence
  Synthetic
aaaaaaguucucuuaggaug

SEQ ID NO: 809619 - RNA, 20 nt, Artificial Sequence
  Synthetic
acaucuaggcccaagggaug

SEQ ID NO: 809620 - RNA, 20 nt, Artificial Sequence
  Synthetic
aaagguagggggaagggaug

SEQ ID NO: 809621 - RNA, 20 nt, Artificial Sequence
  Synthetic
uguggaauauugaagggaug

SEQ ID NO: 809622 - RNA, 20 nt, Artificial Sequence
  Synthetic
acauguuucuagcagggaug

SEQ ID NO: 809623 - RNA, 20 nt, Artificial Sequence
  Synthetic
auacugguaggauagggaug

SEQ ID NO: 809624 - RNA, 20 nt, Artificial Sequence
  Synthetic
ccggggccucucaggggaug

SEQ ID NO: 809625 - RNA, 20 nt, Artificial Sequence
  Synthetic
cagaauuuucaagggggaug

SEQ ID NO: 809626 - RNA, 20 nt, Artificial Sequence
  Synthetic
uguuuacuuugagggggaug

SEQ ID NO: 809627 - RNA, 20 nt, Artificial Sequence
  Synthetic
uguguugggggggggggaug

SEQ ID NO: 809628 - RNA, 20 nt, Artificial Sequence
  Synthetic
acacagaaacucuggggaug

SEQ ID NO: 809629 - RNA, 20 nt, Artificial Sequence
  Synthetic
agcaguuucuucuggggaug

SEQ ID NO: 809630 - RNA, 20 nt, Artificial Sequence
  Synthetic
cuaagcagggagaugggaug

SEQ ID NO: 809631 - RNA, 20 nt, Artificial Sequence
  Synthetic
aaguucugugugaugggaug

SEQ ID NO: 809632 - RNA, 20 nt, Artificial Sequence
  Synthetic
cuguaaaauaaucugggaug

SEQ ID NO: 809633 - RNA, 20 nt, Artificial Sequence
  Synthetic
aguucauucaaagugggaug

SEQ ID NO: 809634 - RNA, 20 nt, Artificial Sequence
  Synthetic
aagggcgagagggugggaug

SEQ ID NO: 809635 - RNA, 20 nt, Artificial Sequence
  Synthetic
aagaaaguuaaguugggaug

SEQ ID NO: 809636 - RNA, 20 nt, Artificial Sequence
  Synthetic
ugguaaggauagaauggaug

SEQ ID NO: 809637 - RNA, 20 nt, Artificial Sequence
  Synthetic
uuggaaucacggaauggaug

SEQ ID NO: 809638 - RNA, 20 nt, Artificial Sequence
  Synthetic
ugcuuuguauuuaauggaug

SEQ ID NO: 809639 - RNA, 20 nt, Artificial Sequence
  Synthetic
auuaauuccacuuauggaug

SEQ ID NO: 809640 - RNA, 20 nt, Artificial Sequence
  Synthetic
cugaaaacagggccuggaug

SEQ ID NO: 809641 - RNA, 20 nt, Artificial Sequence
  Synthetic
ucucaauuccuuucuggaug

SEQ ID NO: 809642 - RNA, 20 nt, Artificial Sequence
  Synthetic
aucaucuccucugguggaug

SEQ ID NO: 809643 - RNA, 20 nt, Artificial Sequence
  Synthetic
aguagccaggcguguggaug

SEQ ID NO: 809644 - RNA, 20 nt, Artificial Sequence
  Synthetic
ucucuaaguuauuguggaug

SEQ ID NO: 809645 - RNA, 20 nt, Artificial Sequence
  Synthetic
ugcuuuauacgaauuggaug

SEQ ID NO: 809646 - RNA, 20 nt, Artificial Sequence
  Synthetic
uucuuuuauaauauuggaug

SEQ ID NO: 809647 - RNA, 20 nt, Artificial Sequence
  Synthetic
auuauuucucugcuuggaug

SEQ ID NO: 809648 - RNA, 20 nt, Artificial Sequence
  Synthetic
uuuuaaaaaauaguuggaug

SEQ ID NO: 809649 - RNA, 20 nt, Artificial Sequence
  Synthetic
accuaacaauuaguuggaug

SEQ ID NO: 809650 - RNA, 20 nt, Artificial Sequence
  Synthetic
uucaagaugagauuuggaug

SEQ ID NO: 809651 - RNA, 20 nt, Artificial Sequence
  Synthetic
uaacaaagcaauuuuggaug

SEQ ID NO: 809652 - RNA, 20 nt, Artificial Sequence
  Synthetic
ccuucgcccacuuuuggaug

SEQ ID NO: 809653 - RNA, 20 nt, Artificial Sequence
  Synthetic
cugggaaugucuuuuggaug

SEQ ID NO: 809654 - RNA, 20 nt, Artificial Sequence
  Synthetic
uguggcucauauaaaugaug

SEQ ID NO: 809655 - RNA, 20 nt, Artificial Sequence
  Synthetic
cauauuuggagccaaugaug

SEQ ID NO: 809656 - RNA, 20 nt, Artificial Sequence
  Synthetic
ucuaccaauuaucaaugaug

SEQ ID NO: 809657 - RNA, 20 nt, Artificial Sequence
  Synthetic
uucugauaaugggaaugaug

SEQ ID NO: 809658 - RNA, 20 nt, Artificial Sequence
  Synthetic
uuuuaagugauugaaugaug

SEQ ID NO: 809659 - RNA, 20 nt, Artificial Sequence
  Synthetic
caacagcaggugccaugaug

SEQ ID NO: 809660 - RNA, 20 nt, Artificial Sequence
  Synthetic
uaggaauaacacucaugaug

SEQ ID NO: 809661 - RNA, 20 nt, Artificial Sequence
  Synthetic
cagcuacauucccgaugaug

SEQ ID NO: 809662 - RNA, 20 nt, Artificial Sequence
  Synthetic
ucuaaugaccagugaugaug

SEQ ID NO: 809663 - RNA, 20 nt, Artificial Sequence
  Synthetic
ugaugaugauuuugaugaug

SEQ ID NO: 809664 - RNA, 20 nt, Artificial Sequence
  Synthetic
uccaguugugggauaugaug

SEQ ID NO: 809665 - RNA, 20 nt, Artificial Sequence
  Synthetic
agguuuuaguuuauaugaug

SEQ ID NO: 809666 - RNA, 20 nt, Artificial Sequence
  Synthetic
cacaccagagugguaugaug

SEQ ID NO: 809667 - RNA, 20 nt, Artificial Sequence
  Synthetic
uuuauguuuuguguaugaug

SEQ ID NO: 809668 - RNA, 20 nt, Artificial Sequence
  Synthetic
uaacuugaauaauuaugaug

SEQ ID NO: 809669 - RNA, 20 nt, Artificial Sequence
  Synthetic
acuugaguguucuuaugaug

SEQ ID NO: 809670 - RNA, 20 nt, Artificial Sequence
  Synthetic
uaaaugaaacuguuaugaug

SEQ ID NO: 809671 - RNA, 20 nt, Artificial Sequence
  Synthetic
ccaaaaagaguacacugaug

SEQ ID NO: 809672 - RNA, 20 nt, Artificial Sequence
  Synthetic
auaaugaaagcucacugaug

SEQ ID NO: 809673 - RNA, 20 nt, Artificial Sequence
  Synthetic
aacuuuaacaccaccugaug

SEQ ID NO: 809674 - RNA, 20 nt, Artificial Sequence
  Synthetic
uccgaagagggggccugaug

SEQ ID NO: 809675 - RNA, 20 nt, Artificial Sequence
  Synthetic
cugcagcucaccuccugaug

SEQ ID NO: 809676 - RNA, 20 nt, Artificial Sequence
  Synthetic
uguguggacagaggcugaug

SEQ ID NO: 809677 - RNA, 20 nt, Artificial Sequence
  Synthetic
auaacuuuuauaugcugaug

SEQ ID NO: 809678 - RNA, 20 nt, Artificial Sequence
  Synthetic
acuccccugaaaaucugaug

SEQ ID NO: 809679 - RNA, 20 nt, Artificial Sequence
  Synthetic
aauacaaauggaaucugaug

SEQ ID NO: 809680 - RNA, 20 nt, Artificial Sequence
  Synthetic
ugauagaugacauucugaug

SEQ ID NO: 809681 - RNA, 20 nt, Artificial Sequence
  Synthetic
ucacaucaaauguucugaug

SEQ ID NO: 809682 - RNA, 20 nt, Artificial Sequence
  Synthetic
ccuuugcccacuuucugaug

SEQ ID NO: 809683 - RNA, 20 nt, Artificial Sequence
  Synthetic
ucuuuuaagaaaaagugaug

SEQ ID NO: 809684 - RNA, 20 nt, Artificial Sequence
  Synthetic
cuguuggaaccaaagugaug

SEQ ID NO: 809685 - RNA, 20 nt, Artificial Sequence
  Synthetic
ugguguaccugaaagugaug

SEQ ID NO: 809686 - RNA, 20 nt, Artificial Sequence
  Synthetic
caauagggugaacagugaug

SEQ ID NO: 809687 - RNA, 20 nt, Artificial Sequence
  Synthetic
cagcuaaaugcccagugaug

SEQ ID NO: 809688 - RNA, 20 nt, Artificial Sequence
  Synthetic
aucuacagaauucagugaug

SEQ ID NO: 809689 - RNA, 20 nt, Artificial Sequence
  Synthetic
aaaaguaaacaggagugaug

SEQ ID NO: 809690 - RNA, 20 nt, Artificial Sequence
  Synthetic
caggcagaaauggagugaug

SEQ ID NO: 809691 - RNA, 20 nt, Artificial Sequence
  Synthetic
uucucuaaugaugagugaug

SEQ ID NO: 809692 - RNA, 20 nt, Artificial Sequence
  Synthetic
uucucugauguugagugaug

SEQ ID NO: 809693 - RNA, 20 nt, Artificial Sequence
  Synthetic
agcugaagacaggcgugaug

SEQ ID NO: 809694 - RNA, 20 nt, Artificial Sequence
  Synthetic
ugcucacugccugggugaug

SEQ ID NO: 809695 - RNA, 20 nt, Artificial Sequence
  Synthetic
ccaaaaugccgauggugaug

SEQ ID NO: 809696 - RNA, 20 nt, Artificial Sequence
  Synthetic
aguaaaucaucuuggugaug

SEQ ID NO: 809697 - RNA, 20 nt, Artificial Sequence
  Synthetic
uugacaacaaaacugugaug

SEQ ID NO: 809698 - RNA, 20 nt, Artificial Sequence
  Synthetic
uugccuuguccacugugaug

SEQ ID NO: 809699 - RNA, 20 nt, Artificial Sequence
  Synthetic
acuuguucuagucugugaug

SEQ ID NO: 809700 - RNA, 20 nt, Artificial Sequence
  Synthetic
auuuuauaauaagugugaug

SEQ ID NO: 809701 - RNA, 20 nt, Artificial Sequence
  Synthetic
auguuccuugacuugugaug

SEQ ID NO: 809702 - RNA, 20 nt, Artificial Sequence
  Synthetic
ugaugaggaagaaauugaug

SEQ ID NO: 809703 - RNA, 20 nt, Artificial Sequence
  Synthetic
aacuugauauaggauugaug

SEQ ID NO: 809704 - RNA, 20 nt, Artificial Sequence
  Synthetic
uccauucucaucacuugaug

SEQ ID NO: 809705 - RNA, 20 nt, Artificial Sequence
  Synthetic
aggacuggcaggacuugaug

SEQ ID NO: 809706 - RNA, 20 nt, Artificial Sequence
  Synthetic
acugauuuugcuacuugaug

SEQ ID NO: 809707 - RNA, 20 nt, Artificial Sequence
  Synthetic
ucagcaaaucccccuugaug

SEQ ID NO: 809708 - RNA, 20 nt, Artificial Sequence
  Synthetic
auauuuuaaauagcuugaug

SEQ ID NO: 809709 - RNA, 20 nt, Artificial Sequence
  Synthetic
aaggcauugguagcuugaug

SEQ ID NO: 809710 - RNA, 20 nt, Artificial Sequence
  Synthetic
aagucauugguagcuugaug

SEQ ID NO: 809711 - RNA, 20 nt, Artificial Sequence
  Synthetic
uuacucaugguuucuugaug

SEQ ID NO: 809712 - RNA, 20 nt, Artificial Sequence
  Synthetic
uaauguuuuguuucuugaug

SEQ ID NO: 809713 - RNA, 20 nt, Artificial Sequence
  Synthetic
ugcuugcaagucgguugaug

SEQ ID NO: 809714 - RNA, 20 nt, Artificial Sequence
  Synthetic
aagaagggaguggguugaug

SEQ ID NO: 809715 - RNA, 20 nt, Artificial Sequence
  Synthetic
cugccaccugccuguugaug

SEQ ID NO: 809716 - RNA, 20 nt, Artificial Sequence
  Synthetic
agguaccagguaauuugaug

SEQ ID NO: 809717 - RNA, 20 nt, Artificial Sequence
  Synthetic
uuacacugaauacuuugaug

SEQ ID NO: 809718 - RNA, 20 nt, Artificial Sequence
  Synthetic
uucucucacugauuuugaug

SEQ ID NO: 809719 - RNA, 20 nt, Artificial Sequence
  Synthetic
auucaaaauaucuuuugaug

SEQ ID NO: 809720 - RNA, 20 nt, Artificial Sequence
  Synthetic
ccuucacccacuuuuugaug

SEQ ID NO: 809721 - RNA, 20 nt, Artificial Sequence
  Synthetic
ccuucccccacuuuuugaug

SEQ ID NO: 809722 - RNA, 20 nt, Artificial Sequence
  Synthetic
ccuucgcccacuuuuugaug

SEQ ID NO: 809723 - RNA, 20 nt, Artificial Sequence
  Synthetic
ccuucgcucacuuuuugaug

SEQ ID NO: 809724 - RNA, 20 nt, Artificial Sequence
  Synthetic
uuugcccauuuuuuuugaug

SEQ ID NO: 809725 - RNA, 20 nt, Artificial Sequence
  Synthetic
uuaaauauccaaaaaauaug

SEQ ID NO: 809726 - RNA, 20 nt, Artificial Sequence
  Synthetic
agguauuuaaugaaaauaug

SEQ ID NO: 809727 - RNA, 20 nt, Artificial Sequence
  Synthetic
aaacuuuuuauuaaaauaug

SEQ ID NO: 809728 - RNA, 20 nt, Artificial Sequence
  Synthetic
auauaaaauuaagaaauaug

SEQ ID NO: 809729 - RNA, 20 nt, Artificial Sequence
  Synthetic
uacauaggaaaggaaauaug

SEQ ID NO: 809730 - RNA, 20 nt, Artificial Sequence
  Synthetic
cuaaucaaagaugaaauaug

SEQ ID NO: 809731 - RNA, 20 nt, Artificial Sequence
  Synthetic
uuuugcugauaauaaauaug

SEQ ID NO: 809732 - RNA, 20 nt, Artificial Sequence
  Synthetic
ccuuauaaauauuaaauaug

SEQ ID NO: 809733 - RNA, 20 nt, Artificial Sequence
  Synthetic
ucucucuuuucuuaaauaug

SEQ ID NO: 809734 - RNA, 20 nt, Artificial Sequence
  Synthetic
ugagaccuaauuuaaauaug

SEQ ID NO: 809735 - RNA, 20 nt, Artificial Sequence
  Synthetic
aauagcaccuguacaauaug

SEQ ID NO: 809736 - RNA, 20 nt, Artificial Sequence
  Synthetic
auaaguacuuacccaauaug

SEQ ID NO: 809737 - RNA, 20 nt, Artificial Sequence
  Synthetic
aaauucaccuacucaauaug

SEQ ID NO: 809738 - RNA, 20 nt, Artificial Sequence
  Synthetic
caacuuaaauauucaauaug

SEQ ID NO: 809739 - RNA, 20 nt, Artificial Sequence
  Synthetic
cauauaaauaaaagaauaug

SEQ ID NO: 809740 - RNA, 20 nt, Artificial Sequence
  Synthetic
augauuggauaaagaauaug

SEQ ID NO: 809741 - RNA, 20 nt, Artificial Sequence
  Synthetic
caccuaugaaugagaauaug

SEQ ID NO: 809742 - RNA, 20 nt, Artificial Sequence
  Synthetic
caccuaugagugagaauaug

SEQ ID NO: 809743 - RNA, 20 nt, Artificial Sequence
  Synthetic
caccugugagugagaauaug

SEQ ID NO: 809744 - RNA, 20 nt, Artificial Sequence
  Synthetic
cacuuaugggugagaauaug

SEQ ID NO: 809745 - RNA, 20 nt, Artificial Sequence
  Synthetic
auuaaauuuaagggaauaug

SEQ ID NO: 809746 - RNA, 20 nt, Artificial Sequence
  Synthetic
acugaaauguucugaauaug

SEQ ID NO: 809747 - RNA, 20 nt, Artificial Sequence
  Synthetic
aaggaguaaacgugaauaug

SEQ ID NO: 809748 - RNA, 20 nt, Artificial Sequence
  Synthetic
agauucccuuggugaauaug

SEQ ID NO: 809749 - RNA, 20 nt, Artificial Sequence
  Synthetic
aaaguaggccugugaauaug

SEQ ID NO: 809750 - RNA, 20 nt, Artificial Sequence
  Synthetic
aacuuugcggaaauaauaug

SEQ ID NO: 809751 - RNA, 20 nt, Artificial Sequence
  Synthetic
ucacagaaaugacuaauaug

SEQ ID NO: 809752 - RNA, 20 nt, Artificial Sequence
  Synthetic
uguucuucaacuguaauaug

SEQ ID NO: 809753 - RNA, 20 nt, Artificial Sequence
  Synthetic
agcauugcacaaaacauaug

SEQ ID NO: 809754 - RNA, 20 nt, Artificial Sequence
  Synthetic
cccagggccagcaacauaug

SEQ ID NO: 809755 - RNA, 20 nt, Artificial Sequence
  Synthetic
uaagauuaaaauaacauaug

SEQ ID NO: 809756 - RNA, 20 nt, Artificial Sequence
  Synthetic
accuuuaucuaacacauaug

SEQ ID NO: 809757 - RNA, 20 nt, Artificial Sequence
  Synthetic
cugagaaauuaagacauaug

SEQ ID NO: 809758 - RNA, 20 nt, Artificial Sequence
  Synthetic
aacugucaaagggacauaug

SEQ ID NO: 809759 - RNA, 20 nt, Artificial Sequence
  Synthetic
cguauauauauauacauaug

SEQ ID NO: 809760 - RNA, 20 nt, Artificial Sequence
  Synthetic
uacuuauuuuuauacauaug

SEQ ID NO: 809761 - RNA, 20 nt, Artificial Sequence
  Synthetic
uacugaaaauuguacauaug

SEQ ID NO: 809762 - RNA, 20 nt, Artificial Sequence
  Synthetic
agaaauuuaaauuacauaug

SEQ ID NO: 809763 - RNA, 20 nt, Artificial Sequence
  Synthetic
aacaaggaauauuacauaug

SEQ ID NO: 809764 - RNA, 20 nt, Artificial Sequence
  Synthetic
uugcugagaauucccauaug

SEQ ID NO: 809765 - RNA, 20 nt, Artificial Sequence
  Synthetic
auuuguuguaugugcauaug

SEQ ID NO: 809766 - RNA, 20 nt, Artificial Sequence
  Synthetic
aaaggaccagaggucauaug

SEQ ID NO: 809767 - RNA, 20 nt, Artificial Sequence
  Synthetic
cauuguagacuuuucauaug

SEQ ID NO: 809768 - RNA, 20 nt, Artificial Sequence
  Synthetic
uagccaauccaaaagauaug

SEQ ID NO: 809769 - RNA, 20 nt, Artificial Sequence
  Synthetic
cuguuuuauccacagauaug

SEQ ID NO: 809770 - RNA, 20 nt, Artificial Sequence
  Synthetic
aagaacccuaugcagauaug

SEQ ID NO: 809771 - RNA, 20 nt, Artificial Sequence
  Synthetic
ccagaauuuuaauagauaug

SEQ ID NO: 809772 - RNA, 20 nt, Artificial Sequence
  Synthetic
auaauuauaagauagauaug

SEQ ID NO: 809773 - RNA, 20 nt, Artificial Sequence
  Synthetic
aaauuugacaucuagauaug

SEQ ID NO: 809774 - RNA, 20 nt, Artificial Sequence
  Synthetic
aucucgauaggguagauaug

SEQ ID NO: 809775 - RNA, 20 nt, Artificial Sequence
  Synthetic
aucagauagugguagauaug

SEQ ID NO: 809776 - RNA, 20 nt, Artificial Sequence
  Synthetic
aucagauaguuguagauaug

SEQ ID NO: 809777 - RNA, 20 nt, Artificial Sequence
  Synthetic
ucccauuaggguaggauaug

SEQ ID NO: 809778 - RNA, 20 nt, Artificial Sequence
  Synthetic
aaaagcauaacaaugauaug

SEQ ID NO: 809779 - RNA, 20 nt, Artificial Sequence
  Synthetic
acuaaaacccuucugauaug

SEQ ID NO: 809780 - RNA, 20 nt, Artificial Sequence
  Synthetic
acauagauuaacuugauaug

SEQ ID NO: 809781 - RNA, 20 nt, Artificial Sequence
  Synthetic
uuuucaaguaaaaauauaug

SEQ ID NO: 809782 - RNA, 20 nt, Artificial Sequence
  Synthetic
acuugccuaagaaauauaug

SEQ ID NO: 809783 - RNA, 20 nt, Artificial Sequence
  Synthetic
auuaucugacacaauauaug

SEQ ID NO: 809784 - RNA, 20 nt, Artificial Sequence
  Synthetic
cacacacacacacauauaug

SEQ ID NO: 809785 - RNA, 20 nt, Artificial Sequence
  Synthetic
cucuccuugagugauauaug

SEQ ID NO: 809786 - RNA, 20 nt, Artificial Sequence
  Synthetic
aauauucauagauauauaug

SEQ ID NO: 809787 - RNA, 20 nt, Artificial Sequence
  Synthetic
gggguacauauauauauaug

SEQ ID NO: 809788 - RNA, 20 nt, Artificial Sequence
  Synthetic
augugggguauauauauaug

SEQ ID NO: 809789 - RNA, 20 nt, Artificial Sequence
  Synthetic
augguuuucaaguauauaug

SEQ ID NO: 809790 - RNA, 20 nt, Artificial Sequence
  Synthetic
acauacauaguguauauaug

SEQ ID NO: 809791 - RNA, 20 nt, Artificial Sequence
  Synthetic
cauauauauguguauauaug

SEQ ID NO: 809792 - RNA, 20 nt, Artificial Sequence
  Synthetic
cucaugacaccaacuauaug

SEQ ID NO: 809793 - RNA, 20 nt, Artificial Sequence
  Synthetic
auggugcuagguccuauaug

SEQ ID NO: 809794 - RNA, 20 nt, Artificial Sequence
  Synthetic
agagauuuauaggcuauaug

SEQ ID NO: 809795 - RNA, 20 nt, Artificial Sequence
  Synthetic
uucccuucuuauucuauaug

SEQ ID NO: 809796 - RNA, 20 nt, Artificial Sequence
  Synthetic
acuuuuagauuuucuauaug

SEQ ID NO: 809797 - RNA, 20 nt, Artificial Sequence
  Synthetic
uucuuguucuucaguauaug

SEQ ID NO: 809798 - RNA, 20 nt, Artificial Sequence
  Synthetic
aggauguuguugaguauaug

SEQ ID NO: 809799 - RNA, 20 nt, Artificial Sequence
  Synthetic
auaacaguuguauguauaug

SEQ ID NO: 809800 - RNA, 20 nt, Artificial Sequence
  Synthetic
ucccucauaagaauuauaug

SEQ ID NO: 809801 - RNA, 20 nt, Artificial Sequence
  Synthetic
aauuuguaacuaauuauaug

SEQ ID NO: 809802 - RNA, 20 nt, Artificial Sequence
  Synthetic
aguaauguuuuaauuauaug

SEQ ID NO: 809803 - RNA, 20 nt, Artificial Sequence
  Synthetic
uuuucuacuauuauuauaug

SEQ ID NO: 809804 - RNA, 20 nt, Artificial Sequence
  Synthetic
cucuuuguauauguuauaug

SEQ ID NO: 809805 - RNA, 20 nt, Artificial Sequence
  Synthetic
uagugauacaguguuauaug

SEQ ID NO: 809806 - RNA, 20 nt, Artificial Sequence
  Synthetic
ugaaugauuccauuuauaug

SEQ ID NO: 809807 - RNA, 20 nt, Artificial Sequence
  Synthetic
cagagaaguugaaaacuaug

SEQ ID NO: 809808 - RNA, 20 nt, Artificial Sequence
  Synthetic
uggccuggcuuucaacuaug

SEQ ID NO: 809809 - RNA, 20 nt, Artificial Sequence
  Synthetic
ugaaauauuuaaacacuaug

SEQ ID NO: 809810 - RNA, 20 nt, Artificial Sequence
  Synthetic
uuuucauuacuaacacuaug

SEQ ID NO: 809811 - RNA, 20 nt, Artificial Sequence
  Synthetic
cugacuguaaguacacuaug

SEQ ID NO: 809812 - RNA, 20 nt, Artificial Sequence
  Synthetic
aauguaggccaaugacuaug

SEQ ID NO: 809813 - RNA, 20 nt, Artificial Sequence
  Synthetic
auacaccauggaauacuaug

SEQ ID NO: 809814 - RNA, 20 nt, Artificial Sequence
  Synthetic
cauuacuauuuaauacuaug

SEQ ID NO: 809815 - RNA, 20 nt, Artificial Sequence
  Synthetic
uccuaucccuuacuacuaug

SEQ ID NO: 809816 - RNA, 20 nt, Artificial Sequence
  Synthetic
agcauaaagaugaaccuaug

SEQ ID NO: 809817 - RNA, 20 nt, Artificial Sequence
  Synthetic
agacuucauuucuaccuaug

SEQ ID NO: 809818 - RNA, 20 nt, Artificial Sequence
  Synthetic
auucuaauaacaacccuaug

SEQ ID NO: 809819 - RNA, 20 nt, Artificial Sequence
  Synthetic
cuuuguguauguggccuaug

SEQ ID NO: 809820 - RNA, 20 nt, Artificial Sequence
  Synthetic
aacccucaugaaugccuaug

SEQ ID NO: 809821 - RNA, 20 nt, Artificial Sequence
  Synthetic
uucuacccaacaauccuaug

SEQ ID NO: 809822 - RNA, 20 nt, Artificial Sequence
  Synthetic
cauacuacccuaauccuaug

SEQ ID NO: 809823 - RNA, 20 nt, Artificial Sequence
  Synthetic
ucaacacaggccauccuaug

SEQ ID NO: 809824 - RNA, 20 nt, Artificial Sequence
  Synthetic
caagugaaauguauccuaug

SEQ ID NO: 809825 - RNA, 20 nt, Artificial Sequence
  Synthetic
auaucuacuaucaagcuaug

SEQ ID NO: 809826 - RNA, 20 nt, Artificial Sequence
  Synthetic
uugauaagauucaagcuaug

SEQ ID NO: 809827 - RNA, 20 nt, Artificial Sequence
  Synthetic
uaagugggagcuaagcuaug

SEQ ID NO: 809828 - RNA, 20 nt, Artificial Sequence
  Synthetic
uacgugggagcuaagcuaug

SEQ ID NO: 809829 - RNA, 20 nt, Artificial Sequence
  Synthetic
aauucuccccuuuagcuaug

SEQ ID NO: 809830 - RNA, 20 nt, Artificial Sequence
  Synthetic
ucuaauuaucuuuagcuaug

SEQ ID NO: 809831 - RNA, 20 nt, Artificial Sequence
  Synthetic
uuaggauugacuuggcuaug

SEQ ID NO: 809832 - RNA, 20 nt, Artificial Sequence
  Synthetic
caaaugucucuaaugcuaug

SEQ ID NO: 809833 - RNA, 20 nt, Artificial Sequence
  Synthetic
uaucucucagggaugcuaug

SEQ ID NO: 809834 - RNA, 20 nt, Artificial Sequence
  Synthetic
aagggaccugagcugcuaug

SEQ ID NO: 809835 - RNA, 20 nt, Artificial Sequence
  Synthetic
ucuagauuuuuaaaucuaug

SEQ ID NO: 809836 - RNA, 20 nt, Artificial Sequence
  Synthetic
uguaauauccagaaucuaug

SEQ ID NO: 809837 - RNA, 20 nt, Artificial Sequence
  Synthetic
auuccacuuacagaucuaug

SEQ ID NO: 809838 - RNA, 20 nt, Artificial Sequence
  Synthetic
auucacauagucacucuaug

SEQ ID NO: 809839 - RNA, 20 nt, Artificial Sequence
  Synthetic
ccugguuccuucacucuaug

SEQ ID NO: 809840 - RNA, 20 nt, Artificial Sequence
  Synthetic
acucugggcagaccucuaug

SEQ ID NO: 809841 - RNA, 20 nt, Artificial Sequence
  Synthetic
cuaggggggcacugucuaug

SEQ ID NO: 809842 - RNA, 20 nt, Artificial Sequence
  Synthetic
acacauaaacucugucuaug

SEQ ID NO: 809843 - RNA, 20 nt, Artificial Sequence
  Synthetic
uaagacuguaaaauucuaug

SEQ ID NO: 809844 - RNA, 20 nt, Artificial Sequence
  Synthetic
aaucucccuuuaauucuaug

SEQ ID NO: 809845 - RNA, 20 nt, Artificial Sequence
  Synthetic
aggaagggacauauucuaug

SEQ ID NO: 809846 - RNA, 20 nt, Artificial Sequence
  Synthetic
ccucuaaauuauauucuaug

SEQ ID NO: 809847 - RNA, 20 nt, Artificial Sequence
  Synthetic
uacauuauauuaguucuaug

SEQ ID NO: 809848 - RNA, 20 nt, Artificial Sequence
  Synthetic
aaauauaucagaaaaguaug

SEQ ID NO: 809849 - RNA, 20 nt, Artificial Sequence
  Synthetic
uguguauuuaugaaaguaug

SEQ ID NO: 809850 - RNA, 20 nt, Artificial Sequence
  Synthetic
aguuuauucagagaaguaug

SEQ ID NO: 809851 - RNA, 20 nt, Artificial Sequence
  Synthetic
ugagauccacgugaaguaug

SEQ ID NO: 809852 - RNA, 20 nt, Artificial Sequence
  Synthetic
aagaaggauaaguaaguaug

SEQ ID NO: 809853 - RNA, 20 nt, Artificial Sequence
  Synthetic
auuaucaggagaacaguaug

SEQ ID NO: 809854 - RNA, 20 nt, Artificial Sequence
  Synthetic
aguaccaugagaacaguaug

SEQ ID NO: 809855 - RNA, 20 nt, Artificial Sequence
  Synthetic
auggaaggugcaagaguaug

SEQ ID NO: 809856 - RNA, 20 nt, Artificial Sequence
  Synthetic
cuguccuggccgagaguaug

SEQ ID NO: 809857 - RNA, 20 nt, Artificial Sequence
  Synthetic
cauuuugauuugagaguaug

SEQ ID NO: 809858 - RNA, 20 nt, Artificial Sequence
  Synthetic
acaaagagagagggaguaug

SEQ ID NO: 809859 - RNA, 20 nt, Artificial Sequence
  Synthetic
cuugugccuauauuaguaug

SEQ ID NO: 809860 - RNA, 20 nt, Artificial Sequence
  Synthetic
uuccaaagaauguuaguaug

SEQ ID NO: 809861 - RNA, 20 nt, Artificial Sequence
  Synthetic
aaggugaaaagaaagguaug

SEQ ID NO: 809862 - RNA, 20 nt, Artificial Sequence
  Synthetic
cugaaaagugaguagguaug

SEQ ID NO: 809863 - RNA, 20 nt, Artificial Sequence
  Synthetic
aucagauggcuguagguaug

SEQ ID NO: 809864 - RNA, 20 nt, Artificial Sequence
  Synthetic
aucagauaguuguagguaug

SEQ ID NO: 809865 - RNA, 20 nt, Artificial Sequence
  Synthetic
acuagcugugugacgguaug

SEQ ID NO: 809866 - RNA, 20 nt, Artificial Sequence
  Synthetic
uugcugaugaaugggguaug

SEQ ID NO: 809867 - RNA, 20 nt, Artificial Sequence
  Synthetic
agaauggagugguggguaug

SEQ ID NO: 809868 - RNA, 20 nt, Artificial Sequence
  Synthetic
aauguggggguguggguaug

SEQ ID NO: 809869 - RNA, 20 nt, Artificial Sequence
  Synthetic
augguggccacuuggguaug

SEQ ID NO: 809870 - RNA, 20 nt, Artificial Sequence
  Synthetic
ucccagaccaggaugguaug

SEQ ID NO: 809871 - RNA, 20 nt, Artificial Sequence
  Synthetic
aaaccacuuaauaugguaug

SEQ ID NO: 809872 - RNA, 20 nt, Artificial Sequence
  Synthetic
caaaaucaguaccugguaug

SEQ ID NO: 809873 - RNA, 20 nt, Artificial Sequence
  Synthetic
uaagcuaagugccugguaug

SEQ ID NO: 809874 - RNA, 20 nt, Artificial Sequence
  Synthetic
ucggggaggaggcugguaug

SEQ ID NO: 809875 - RNA, 20 nt, Artificial Sequence
  Synthetic
uuuacuucucauuugguaug

SEQ ID NO: 809876 - RNA, 20 nt, Artificial Sequence
  Synthetic
aucccauagguuuugguaug

SEQ ID NO: 809877 - RNA, 20 nt, Artificial Sequence
  Synthetic
auuuaaggaaaaaauguaug

SEQ ID NO: 809878 - RNA, 20 nt, Artificial Sequence
  Synthetic
aagagggaaagaaauguaug

SEQ ID NO: 809879 - RNA, 20 nt, Artificial Sequence
  Synthetic
uacucuuuuguuaauguaug

SEQ ID NO: 809880 - RNA, 20 nt, Artificial Sequence
  Synthetic
aaaguuuugucacauguaug

SEQ ID NO: 809881 - RNA, 20 nt, Artificial Sequence
  Synthetic
uucaauuuuugugauguaug

SEQ ID NO: 809882 - RNA, 20 nt, Artificial Sequence
  Synthetic
agccagagcucuccuguaug

SEQ ID NO: 809883 - RNA, 20 nt, Artificial Sequence
  Synthetic
ugucugcuuguagcuguaug

SEQ ID NO: 809884 - RNA, 20 nt, Artificial Sequence
  Synthetic
ugccugcuguuugguguaug

SEQ ID NO: 809885 - RNA, 20 nt, Artificial Sequence
  Synthetic
caggaacacacguguguaug

SEQ ID NO: 809886 - RNA, 20 nt, Artificial Sequence
  Synthetic
aaagaaagcccuuguguaug

SEQ ID NO: 809887 - RNA, 20 nt, Artificial Sequence
  Synthetic
uggaauguuugcauuguaug

SEQ ID NO: 809888 - RNA, 20 nt, Artificial Sequence
  Synthetic
agaaaguaguagcuuguaug

SEQ ID NO: 809889 - RNA, 20 nt, Artificial Sequence
  Synthetic
acaucucccuggcuuguaug

SEQ ID NO: 809890 - RNA, 20 nt, Artificial Sequence
  Synthetic
uauuaauuaaaauuuguaug

SEQ ID NO: 809891 - RNA, 20 nt, Artificial Sequence
  Synthetic
caucuggggacauuuguaug

SEQ ID NO: 809892 - RNA, 20 nt, Artificial Sequence
  Synthetic
aacuuaaaggcguuuguaug

SEQ ID NO: 809893 - RNA, 20 nt, Artificial Sequence
  Synthetic
ucucuguguguguuuguaug

SEQ ID NO: 809894 - RNA, 20 nt, Artificial Sequence
  Synthetic
uaaguugagaauuuuguaug

SEQ ID NO: 809895 - RNA, 20 nt, Artificial Sequence
  Synthetic
cauauagcaaauaaauuaug

SEQ ID NO: 809896 - RNA, 20 nt, Artificial Sequence
  Synthetic
uaauugcugaauaaauuaug

SEQ ID NO: 809897 - RNA, 20 nt, Artificial Sequence
  Synthetic
augcacauuuauaaauuaug

SEQ ID NO: 809898 - RNA, 20 nt, Artificial Sequence
  Synthetic
auguacaauucagaauuaug

SEQ ID NO: 809899 - RNA, 20 nt, Artificial Sequence
  Synthetic
agaaugauuugagaauuaug

SEQ ID NO: 809900 - RNA, 20 nt, Artificial Sequence
  Synthetic
uauuggggcuaggaauuaug

SEQ ID NO: 809901 - RNA, 20 nt, Artificial Sequence
  Synthetic
uguauucuugaauaauuaug

SEQ ID NO: 809902 - RNA, 20 nt, Artificial Sequence
  Synthetic
ugaacggacugauaauuaug

SEQ ID NO: 809903 - RNA, 20 nt, Artificial Sequence
  Synthetic
uagcuuggaaaguaauuaug

SEQ ID NO: 809904 - RNA, 20 nt, Artificial Sequence
  Synthetic
ccugugauggaaacauuaug

SEQ ID NO: 809905 - RNA, 20 nt, Artificial Sequence
  Synthetic
uuucacauugagacauuaug

SEQ ID NO: 809906 - RNA, 20 nt, Artificial Sequence
  Synthetic
uccucuuacuugacauuaug

SEQ ID NO: 809907 - RNA, 20 nt, Artificial Sequence
  Synthetic
augcaucuuacaccauuaug

SEQ ID NO: 809908 - RNA, 20 nt, Artificial Sequence
  Synthetic
aaagaguuuucaucauuaug

SEQ ID NO: 809909 - RNA, 20 nt, Artificial Sequence
  Synthetic
aucagugagcuuucauuaug

SEQ ID NO: 809910 - RNA, 20 nt, Artificial Sequence
  Synthetic
uugcuaaagcacagauuaug

SEQ ID NO: 809911 - RNA, 20 nt, Artificial Sequence
  Synthetic
uuauaugaauuaggauuaug

SEQ ID NO: 809912 - RNA, 20 nt, Artificial Sequence
  Synthetic
ugaaaaaaauagggauuaug

SEQ ID NO: 809913 - RNA, 20 nt, Artificial Sequence
  Synthetic
uuugacaccuggggauuaug

SEQ ID NO: 809914 - RNA, 20 nt, Artificial Sequence
  Synthetic
cccaaagugcugggauuaug

SEQ ID NO: 809915 - RNA, 20 nt, Artificial Sequence
  Synthetic
uuugaggauacgugauuaug

SEQ ID NO: 809916 - RNA, 20 nt, Artificial Sequence
  Synthetic
uguauuucaaugugauuaug

SEQ ID NO: 809917 - RNA, 20 nt, Artificial Sequence
  Synthetic
acuugguuaccuugauuaug

SEQ ID NO: 809918 - RNA, 20 nt, Artificial Sequence
  Synthetic
uucuuacagcuaauauuaug

SEQ ID NO: 809919 - RNA, 20 nt, Artificial Sequence
  Synthetic
uagucgacaacuauauuaug

SEQ ID NO: 809920 - RNA, 20 nt, Artificial Sequence
  Synthetic
auuaaaauccaccuauuaug

SEQ ID NO: 809921 - RNA, 20 nt, Artificial Sequence
  Synthetic
auugggcugugucuauuaug

SEQ ID NO: 809922 - RNA, 20 nt, Artificial Sequence
  Synthetic
auuugcccaaaaguauuaug

SEQ ID NO: 809923 - RNA, 20 nt, Artificial Sequence
  Synthetic
cuggcaaaguuuguauuaug

SEQ ID NO: 809924 - RNA, 20 nt, Artificial Sequence
  Synthetic
aauauuuucaaauuauuaug

SEQ ID NO: 809925 - RNA, 20 nt, Artificial Sequence
  Synthetic
auuuucccuagauuauuaug

SEQ ID NO: 809926 - RNA, 20 nt, Artificial Sequence
  Synthetic
uucauuaaauauuuauuaug

SEQ ID NO: 809927 - RNA, 20 nt, Artificial Sequence
  Synthetic
aauauguugguuuuauuaug

SEQ ID NO: 809928 - RNA, 20 nt, Artificial Sequence
  Synthetic
auuaggauuuuccacuuaug

SEQ ID NO: 809929 - RNA, 20 nt, Artificial Sequence
  Synthetic
uaaagccaaacucacuuaug

SEQ ID NO: 809930 - RNA, 20 nt, Artificial Sequence
  Synthetic
auuucucaaguggacuuaug

SEQ ID NO: 809931 - RNA, 20 nt, Artificial Sequence
  Synthetic
acaauaaauuccuacuuaug

SEQ ID NO: 809932 - RNA, 20 nt, Artificial Sequence
  Synthetic
cuugcuugguguuacuuaug

SEQ ID NO: 809933 - RNA, 20 nt, Artificial Sequence
  Synthetic
cuaaguauccaaugcuuaug

SEQ ID NO: 809934 - RNA, 20 nt, Artificial Sequence
  Synthetic
cacaccaucuaaugcuuaug

SEQ ID NO: 809935 - RNA, 20 nt, Artificial Sequence
  Synthetic
uuauuuucgcucugcuuaug

SEQ ID NO: 809936 - RNA, 20 nt, Artificial Sequence
  Synthetic
uaagagcucaguaucuuaug

SEQ ID NO: 809937 - RNA, 20 nt, Artificial Sequence
  Synthetic
uucugcgugucccucuuaug

SEQ ID NO: 809938 - RNA, 20 nt, Artificial Sequence
  Synthetic
auccucauauaauucuuaug

SEQ ID NO: 809939 - RNA, 20 nt, Artificial Sequence
  Synthetic
aaagagaaaggauucuuaug

SEQ ID NO: 809940 - RNA, 20 nt, Artificial Sequence
  Synthetic
uuacuguucccuuucuuaug

SEQ ID NO: 809941 - RNA, 20 nt, Artificial Sequence
  Synthetic
uaggcccugcaaaaguuaug

SEQ ID NO: 809942 - RNA, 20 nt, Artificial Sequence
  Synthetic
aaauaacguggaaaguuaug

SEQ ID NO: 809943 - RNA, 20 nt, Artificial Sequence
  Synthetic
uuguuacuuguaaaguuaug

SEQ ID NO: 809944 - RNA, 20 nt, Artificial Sequence
  Synthetic
uauaugaaucuuaaguuaug

SEQ ID NO: 809945 - RNA, 20 nt, Artificial Sequence
  Synthetic
aaaacauauaaagaguuaug

SEQ ID NO: 809946 - RNA, 20 nt, Artificial Sequence
  Synthetic
uuuggagagcgggaguuaug

SEQ ID NO: 809947 - RNA, 20 nt, Artificial Sequence
  Synthetic
uggcccauuuaugaguuaug

SEQ ID NO: 809948 - RNA, 20 nt, Artificial Sequence
  Synthetic
ugaaacuuagagagguuaug

SEQ ID NO: 809949 - RNA, 20 nt, Artificial Sequence
  Synthetic
uggggauuauggagguuaug

SEQ ID NO: 809950 - RNA, 20 nt, Artificial Sequence
  Synthetic
aagacaaccagaugguuaug

SEQ ID NO: 809951 - RNA, 20 nt, Artificial Sequence
  Synthetic
uuaauaaccagcauguuaug

SEQ ID NO: 809952 - RNA, 20 nt, Artificial Sequence
  Synthetic
uccaguggauaacuguuaug

SEQ ID NO: 809953 - RNA, 20 nt, Artificial Sequence
  Synthetic
ucuuuuagaagaguguuaug

SEQ ID NO: 809954 - RNA, 20 nt, Artificial Sequence
  Synthetic
uaugucacaggguuguuaug

SEQ ID NO: 809955 - RNA, 20 nt, Artificial Sequence
  Synthetic
aucauagaguuguuguuaug

SEQ ID NO: 809956 - RNA, 20 nt, Artificial Sequence
  Synthetic
uuucucuuaaaaaauuuaug

SEQ ID NO: 809957 - RNA, 20 nt, Artificial Sequence
  Synthetic
ucugauuuuuaaaauuuaug

SEQ ID NO: 809958 - RNA, 20 nt, Artificial Sequence
  Synthetic
uuuauuuauauaaauuuaug

SEQ ID NO: 809959 - RNA, 20 nt, Artificial Sequence
  Synthetic
uaggcugcacuaaauuuaug

SEQ ID NO: 809960 - RNA, 20 nt, Artificial Sequence
  Synthetic
cauauuuuguguaauuuaug

SEQ ID NO: 809961 - RNA, 20 nt, Artificial Sequence
  Synthetic
acauuuccucaacauuuaug

SEQ ID NO: 809962 - RNA, 20 nt, Artificial Sequence
  Synthetic
cucaaaagaagacauuuaug

SEQ ID NO: 809963 - RNA, 20 nt, Artificial Sequence
  Synthetic
cucaaaguaagacauuuaug

SEQ ID NO: 809964 - RNA, 20 nt, Artificial Sequence
  Synthetic
aauaauuauauacauuuaug

SEQ ID NO: 809965 - RNA, 20 nt, Artificial Sequence
  Synthetic
agauuucuguuucauuuaug

SEQ ID NO: 809966 - RNA, 20 nt, Artificial Sequence
  Synthetic
aauaaguacauauauuuaug

SEQ ID NO: 809967 - RNA, 20 nt, Artificial Sequence
  Synthetic
uuuauaaaauuauauuuaug

SEQ ID NO: 809968 - RNA, 20 nt, Artificial Sequence
  Synthetic
uguucaggaaucuauuuaug

SEQ ID NO: 809969 - RNA, 20 nt, Artificial Sequence
  Synthetic
cuuuugaagaaguauuuaug

SEQ ID NO: 809970 - RNA, 20 nt, Artificial Sequence
  Synthetic
aauaacuauauguauuuaug

SEQ ID NO: 809971 - RNA, 20 nt, Artificial Sequence
  Synthetic
aguagguguauguauuuaug

SEQ ID NO: 809972 - RNA, 20 nt, Artificial Sequence
  Synthetic
aagaaacagaaaacuuuaug

SEQ ID NO: 809973 - RNA, 20 nt, Artificial Sequence
  Synthetic
ccguggucagugccuuuaug

SEQ ID NO: 809974 - RNA, 20 nt, Artificial Sequence
  Synthetic
ccaagaauauaagcuuuaug

SEQ ID NO: 809975 - RNA, 20 nt, Artificial Sequence
  Synthetic
uugagcaguucugcuuuaug

SEQ ID NO: 809976 - RNA, 20 nt, Artificial Sequence
  Synthetic
auucucuuguuaucuuuaug

SEQ ID NO: 809977 - RNA, 20 nt, Artificial Sequence
  Synthetic
ucuagggggaggucuuuaug

SEQ ID NO: 809978 - RNA, 20 nt, Artificial Sequence
  Synthetic
uuaagaauaaaucguuuaug

SEQ ID NO: 809979 - RNA, 20 nt, Artificial Sequence
  Synthetic
uguugaaaccaugguuuaug

SEQ ID NO: 809980 - RNA, 20 nt, Artificial Sequence
  Synthetic
uauucaauuuucuguuuaug

SEQ ID NO: 809981 - RNA, 20 nt, Artificial Sequence
  Synthetic
uuauucuggguguguuuaug

SEQ ID NO: 809982 - RNA, 20 nt, Artificial Sequence
  Synthetic
ugccauuuguuaauuuuaug

SEQ ID NO: 809983 - RNA, 20 nt, Artificial Sequence
  Synthetic
ccucccuaacucauuuuaug

SEQ ID NO: 809984 - RNA, 20 nt, Artificial Sequence
  Synthetic
aacuuuacguauauuuuaug

SEQ ID NO: 809985 - RNA, 20 nt, Artificial Sequence
  Synthetic
cuggcauagcuuauuuuaug

SEQ ID NO: 809986 - RNA, 20 nt, Artificial Sequence
  Synthetic
uagcuguucuuccuuuuaug

SEQ ID NO: 809987 - RNA, 20 nt, Artificial Sequence
  Synthetic
auuagaauguaaguuuuaug

SEQ ID NO: 809988 - RNA, 20 nt, Artificial Sequence
  Synthetic
ugaagucauccuguuuuaug

SEQ ID NO: 809989 - RNA, 20 nt, Artificial Sequence
  Synthetic
uaucauaauuuuguuuuaug

SEQ ID NO: 809990 - RNA, 20 nt, Artificial Sequence
  Synthetic
aaggauaguuuuguuuuaug

SEQ ID NO: 809991 - RNA, 20 nt, Artificial Sequence
  Synthetic
aagcucaagugauuuuuaug

SEQ ID NO: 809992 - RNA, 20 nt, Artificial Sequence
  Synthetic
cuuugcugaugcuuuuuaug

SEQ ID NO: 809993 - RNA, 20 nt, Artificial Sequence
  Synthetic
ccucccuaacucuuuuuaug

SEQ ID NO: 809994 - RNA, 20 nt, Artificial Sequence
  Synthetic
cuucccuaacucuuuuuaug

SEQ ID NO: 809995 - RNA, 20 nt, Artificial Sequence
  Synthetic
caggaaagaaacaaaaacug

SEQ ID NO: 809996 - RNA, 20 nt, Artificial Sequence
  Synthetic
aaagcaaaaagcaaaaacug

SEQ ID NO: 809997 - RNA, 20 nt, Artificial Sequence
  Synthetic
aacuggggaaagcaaaacug

SEQ ID NO: 809998 - RNA, 20 nt, Artificial Sequence
  Synthetic
auuuuacagaugcaaaacug

SEQ ID NO: 809999 - RNA, 20 nt, Artificial Sequence
  Synthetic
uuguuggcuaugcaaaacug

SEQ ID NO: 810000 - RNA, 20 nt, Artificial Sequence
  Synthetic
auaauccaaauagaaaacug

SEQ ID NO: 810001 - RNA, 20 nt, Artificial Sequence
  Synthetic
uuucacauuggauaaaacug

SEQ ID NO: 810002 - RNA, 20 nt, Artificial Sequence
  Synthetic
augauagaaaauuaaaacug

SEQ ID NO: 810003 - RNA, 20 nt, Artificial Sequence
  Synthetic
uugauugucucuuaaaacug

SEQ ID NO: 810004 - RNA, 20 nt, Artificial Sequence
  Synthetic
aaacauuacaguuaaaacug

SEQ ID NO: 810005 - RNA, 20 nt, Artificial Sequence
  Synthetic
aagacaauggaaacaaacug

SEQ ID NO: 810006 - RNA, 20 nt, Artificial Sequence
  Synthetic
uuuuuacacagcacaaacug

SEQ ID NO: 810007 - RNA, 20 nt, Artificial Sequence
  Synthetic
uugcagcugaagacaaacug

SEQ ID NO: 810008 - RNA, 20 nt, Artificial Sequence
  Synthetic
auucugauaccuccaaacug

SEQ ID NO: 810009 - RNA, 20 nt, Artificial Sequence
  Synthetic
ugacagcaagaaucaaacug

SEQ ID NO: 810010 - RNA, 20 nt, Artificial Sequence
  Synthetic
ugacagugcuuuucaaacug

SEQ ID NO: 810011 - RNA, 20 nt, Artificial Sequence
  Synthetic
acaaguagauaaagaaacug

SEQ ID NO: 810012 - RNA, 20 nt, Artificial Sequence
  Synthetic
uuuccaagauggagaaacug

SEQ ID NO: 810013 - RNA, 20 nt, Artificial Sequence
  Synthetic
auuuuaagacgaggaaacug

SEQ ID NO: 810014 - RNA, 20 nt, Artificial Sequence
  Synthetic
uuuagcaaaggaggaaacug

SEQ ID NO: 810015 - RNA, 20 nt, Artificial Sequence
  Synthetic
aaaacuuuaugaggaaacug

SEQ ID NO: 810016 - RNA, 20 nt, Artificial Sequence
  Synthetic
accaugggucacugaaacug

SEQ ID NO: 810017 - RNA, 20 nt, Artificial Sequence
  Synthetic
ugugagcaacaaauaaacug

SEQ ID NO: 810018 - RNA, 20 nt, Artificial Sequence
  Synthetic
aggggaaugguaauaaacug

SEQ ID NO: 810019 - RNA, 20 nt, Artificial Sequence
  Synthetic
uggggguggggcauaaacug

SEQ ID NO: 810020 - RNA, 20 nt, Artificial Sequence
  Synthetic
aacaaaagcaagauaaacug

SEQ ID NO: 810021 - RNA, 20 nt, Artificial Sequence
  Synthetic
uuagcagaauggauaaacug

SEQ ID NO: 810022 - RNA, 20 nt, Artificial Sequence
  Synthetic
uaauucucuuuccuaaacug

SEQ ID NO: 810023 - RNA, 20 nt, Artificial Sequence
  Synthetic
auguguuacauaaacaacug

SEQ ID NO: 810024 - RNA, 20 nt, Artificial Sequence
  Synthetic
aacacagugaugaacaacug

SEQ ID NO: 810025 - RNA, 20 nt, Artificial Sequence
  Synthetic
cauaaguaauaauacaacug

SEQ ID NO: 810026 - RNA, 20 nt, Artificial Sequence
  Synthetic
aaguguaacuaauacaacug

SEQ ID NO: 810027 - RNA, 20 nt, Artificial Sequence
  Synthetic
ucugcucuugucuccaacug

SEQ ID NO: 810028 - RNA, 20 nt, Artificial Sequence
  Synthetic
cugcaugucuucagcaacug

SEQ ID NO: 810029 - RNA, 20 nt, Artificial Sequence
  Synthetic
aaacagaagagaggcaacug

SEQ ID NO: 810030 - RNA, 20 nt, Artificial Sequence
  Synthetic
ucaaacacauucugcaacug

SEQ ID NO: 810031 - RNA, 20 nt, Artificial Sequence
  Synthetic
uugcacauaagaaucaacug

SEQ ID NO: 810032 - RNA, 20 nt, Artificial Sequence
  Synthetic
cucuguuacagcaucaacug

SEQ ID NO: 810033 - RNA, 20 nt, Artificial Sequence
  Synthetic
aaaugaaauuagaucaacug

SEQ ID NO: 810034 - RNA, 20 nt, Artificial Sequence
  Synthetic
uuauucaguuuccucaacug

SEQ ID NO: 810035 - RNA, 20 nt, Artificial Sequence
  Synthetic
uacuagaagucaaagaacug

SEQ ID NO: 810036 - RNA, 20 nt, Artificial Sequence
  Synthetic
cuucuguaaucccagaacug

SEQ ID NO: 810037 - RNA, 20 nt, Artificial Sequence
  Synthetic
uaaauccaucuccagaacug

SEQ ID NO: 810038 - RNA, 20 nt, Artificial Sequence
  Synthetic
aaacgagggacagagaacug

SEQ ID NO: 810039 - RNA, 20 nt, Artificial Sequence
  Synthetic
ucguauuuuaauuagaacug

SEQ ID NO: 810040 - RNA, 20 nt, Artificial Sequence
  Synthetic
caaagacauauaaggaacug

SEQ ID NO: 810041 - RNA, 20 nt, Artificial Sequence
  Synthetic
uauuaaauugccaggaacug

SEQ ID NO: 810042 - RNA, 20 nt, Artificial Sequence
  Synthetic
auuacuaaucuggggaacug

SEQ ID NO: 810043 - RNA, 20 nt, Artificial Sequence
  Synthetic
ccaguggaaaagcugaacug

SEQ ID NO: 810044 - RNA, 20 nt, Artificial Sequence
  Synthetic
augguaucugaugugaacug

SEQ ID NO: 810045 - RNA, 20 nt, Artificial Sequence
  Synthetic
uucacacuacuuaauaacug

SEQ ID NO: 810046 - RNA, 20 nt, Artificial Sequence
  Synthetic
cacucacuaacucauaacug

SEQ ID NO: 810047 - RNA, 20 nt, Artificial Sequence
  Synthetic
uggaaaagaauucauaacug

SEQ ID NO: 810048 - RNA, 20 nt, Artificial Sequence
  Synthetic
aguugauaaacagauaacug

SEQ ID NO: 810049 - RNA, 20 nt, Artificial Sequence
  Synthetic
ucuuaaagaacuuauaacug

SEQ ID NO: 810050 - RNA, 20 nt, Artificial Sequence
  Synthetic
uuuuucagaaaaaguaacug

SEQ ID NO: 810051 - RNA, 20 nt, Artificial Sequence
  Synthetic
auuugguuaauauguaacug

SEQ ID NO: 810052 - RNA, 20 nt, Artificial Sequence
  Synthetic
uuugagagaaaaauuaacug

SEQ ID NO: 810053 - RNA, 20 nt, Artificial Sequence
  Synthetic
uugcacacucauauuaacug

SEQ ID NO: 810054 - RNA, 20 nt, Artificial Sequence
  Synthetic
uguccagagugaaaacacug

SEQ ID NO: 810055 - RNA, 20 nt, Artificial Sequence
  Synthetic
cacuaguaaucccaacacug

SEQ ID NO: 810056 - RNA, 20 nt, Artificial Sequence
  Synthetic
uugauuuucuuucaacacug

SEQ ID NO: 810057 - RNA, 20 nt, Artificial Sequence
  Synthetic
aaagcuaaguaguaacacug

SEQ ID NO: 810058 - RNA, 20 nt, Artificial Sequence
  Synthetic
ccauacuuuggguaacacug

SEQ ID NO: 810059 - RNA, 20 nt, Artificial Sequence
  Synthetic
ugagucuaggaaacacacug

SEQ ID NO: 810060 - RNA, 20 nt, Artificial Sequence
  Synthetic
uaucauuaccuaacacacug

SEQ ID NO: 810061 - RNA, 20 nt, Artificial Sequence
  Synthetic
auaucaacagccacacacug

SEQ ID NO: 810062 - RNA, 20 nt, Artificial Sequence
  Synthetic
aaggggaacaucacacacug

SEQ ID NO: 810063 - RNA, 20 nt, Artificial Sequence
  Synthetic
acaaauguucugccacacug

SEQ ID NO: 810064 - RNA, 20 nt, Artificial Sequence
  Synthetic
agccuuaugccagcacacug

SEQ ID NO: 810065 - RNA, 20 nt, Artificial Sequence
  Synthetic
ugaguaaagagagcacacug

SEQ ID NO: 810066 - RNA, 20 nt, Artificial Sequence
  Synthetic
uuucagggcugagcacacug

SEQ ID NO: 810067 - RNA, 20 nt, Artificial Sequence
  Synthetic
uucagaaggggcucacacug

SEQ ID NO: 810068 - RNA, 20 nt, Artificial Sequence
  Synthetic
auuaguccauuuucacacug

SEQ ID NO: 810069 - RNA, 20 nt, Artificial Sequence
  Synthetic
cuccuauuagccagacacug

SEQ ID NO: 810070 - RNA, 20 nt, Artificial Sequence
  Synthetic
uuuugcagaugaggacacug

SEQ ID NO: 810071 - RNA, 20 nt, Artificial Sequence
  Synthetic
uaagauggaaguugacacug

SEQ ID NO: 810072 - RNA, 20 nt, Artificial Sequence
  Synthetic
caacauguguaaauacacug

SEQ ID NO: 810073 - RNA, 20 nt, Artificial Sequence
  Synthetic
uuugaaauaugcauacacug

SEQ ID NO: 810074 - RNA, 20 nt, Artificial Sequence
  Synthetic
aaugugguacauauacacug

SEQ ID NO: 810075 - RNA, 20 nt, Artificial Sequence
  Synthetic
ucugauauauguauacacug

SEQ ID NO: 810076 - RNA, 20 nt, Artificial Sequence
  Synthetic
aaaacucacucacuacacug

SEQ ID NO: 810077 - RNA, 20 nt, Artificial Sequence
  Synthetic
aauacccagggaguacacug

SEQ ID NO: 810078 - RNA, 20 nt, Artificial Sequence
  Synthetic
uuaccaaauggauuacacug

SEQ ID NO: 810079 - RNA, 20 nt, Artificial Sequence
  Synthetic
cuaacucaguuauuacacug

SEQ ID NO: 810080 - RNA, 20 nt, Artificial Sequence
  Synthetic
ccaaggauggcucaccacug

SEQ ID NO: 810081 - RNA, 20 nt, Artificial Sequence
  Synthetic
agaaguaaaagucaccacug

SEQ ID NO: 810082 - RNA, 20 nt, Artificial Sequence
  Synthetic
acaccacaucuggaccacug

SEQ ID NO: 810083 - RNA, 20 nt, Artificial Sequence
  Synthetic
ccaacacagaguccccacug

SEQ ID NO: 810084 - RNA, 20 nt, Artificial Sequence
  Synthetic
uccacacagaguccccacug

SEQ ID NO: 810085 - RNA, 20 nt, Artificial Sequence
  Synthetic
cccacauagaguccccacug

SEQ ID NO: 810086 - RNA, 20 nt, Artificial Sequence
  Synthetic
aguggaguuuaaucccacug

SEQ ID NO: 810087 - RNA, 20 nt, Artificial Sequence
  Synthetic
uuggggugugcaucccacug

SEQ ID NO: 810088 - RNA, 20 nt, Artificial Sequence
  Synthetic
cccucaugcuccucccacug

SEQ ID NO: 810089 - RNA, 20 nt, Artificial Sequence
  Synthetic
ucuauuauguuaagccacug

SEQ ID NO: 810090 - RNA, 20 nt, Artificial Sequence
  Synthetic
ccaccgauacagagccacug

SEQ ID NO: 810091 - RNA, 20 nt, Artificial Sequence
  Synthetic
cuaguuuugcaaggccacug

SEQ ID NO: 810092 - RNA, 20 nt, Artificial Sequence
  Synthetic
uuccgagagcuaugccacug

SEQ ID NO: 810093 - RNA, 20 nt, Artificial Sequence
  Synthetic
ugagcacugaaacuccacug

SEQ ID NO: 810094 - RNA, 20 nt, Artificial Sequence
  Synthetic
uuuaaauaauauguccacug

SEQ ID NO: 810095 - RNA, 20 nt, Artificial Sequence
  Synthetic
uuuuuaguuuuauuccacug

SEQ ID NO: 810096 - RNA, 20 nt, Artificial Sequence
  Synthetic
ugcauguaaucccagcacug

SEQ ID NO: 810097 - RNA, 20 nt, Artificial Sequence
  Synthetic
ugccuguaaucccagcacug

SEQ ID NO: 810098 - RNA, 20 nt, Artificial Sequence
  Synthetic
ugcccaaggacugagcacug

SEQ ID NO: 810099 - RNA, 20 nt, Artificial Sequence
  Synthetic
ugauuacauugggcgcacug

SEQ ID NO: 810100 - RNA, 20 nt, Artificial Sequence
  Synthetic
aagacuauuuaaaggcacug

SEQ ID NO: 810101 - RNA, 20 nt, Artificial Sequence
  Synthetic
cucaagagcagauggcacug

SEQ ID NO: 810102 - RNA, 20 nt, Artificial Sequence
  Synthetic
agaagcagggucuggcacug

SEQ ID NO: 810103 - RNA, 20 nt, Artificial Sequence
  Synthetic
uaaugaaauuauuggcacug

SEQ ID NO: 810104 - RNA, 20 nt, Artificial Sequence
  Synthetic
acauaacauuuaaugcacug

SEQ ID NO: 810105 - RNA, 20 nt, Artificial Sequence
  Synthetic
uugguccuaaaauugcacug

SEQ ID NO: 810106 - RNA, 20 nt, Artificial Sequence
  Synthetic
aguggauucccauugcacug

SEQ ID NO: 810107 - RNA, 20 nt, Artificial Sequence
  Synthetic
uauaucacacacuugcacug

SEQ ID NO: 810108 - RNA, 20 nt, Artificial Sequence
  Synthetic
caggaaacuuacaaucacug

SEQ ID NO: 810109 - RNA, 20 nt, Artificial Sequence
  Synthetic
uguccuccagagaaucacug

SEQ ID NO: 810110 - RNA, 20 nt, Artificial Sequence
  Synthetic
aagcacaaucaucaucacug

SEQ ID NO: 810111 - RNA, 20 nt, Artificial Sequence
  Synthetic
aguuaguguagucaucacug

SEQ ID NO: 810112 - RNA, 20 nt, Artificial Sequence
  Synthetic
aucagcagccauccucacug

SEQ ID NO: 810113 - RNA, 20 nt, Artificial Sequence
  Synthetic
aaaaaaauuuguccucacug

SEQ ID NO: 810114 - RNA, 20 nt, Artificial Sequence
  Synthetic
auuaaaugugauauucacug

SEQ ID NO: 810115 - RNA, 20 nt, Artificial Sequence
  Synthetic
ccuucuucauuuauucacug

SEQ ID NO: 810116 - RNA, 20 nt, Artificial Sequence
  Synthetic
cuaaauauagaaguucacug

SEQ ID NO: 810117 - RNA, 20 nt, Artificial Sequence
  Synthetic
uuuuaaaacuaauuucacug

SEQ ID NO: 810118 - RNA, 20 nt, Artificial Sequence
  Synthetic
uuacagauuauauuucacug

SEQ ID NO: 810119 - RNA, 20 nt, Artificial Sequence
  Synthetic
uuaagauuggucuuucacug

SEQ ID NO: 810120 - RNA, 20 nt, Artificial Sequence
  Synthetic
uaagcccuguucuuucacug

SEQ ID NO: 810121 - RNA, 20 nt, Artificial Sequence
  Synthetic
aucuucaaacuguuucacug

SEQ ID NO: 810122 - RNA, 20 nt, Artificial Sequence
  Synthetic
cuuuauugauuguuucacug

SEQ ID NO: 810123 - RNA, 20 nt, Artificial Sequence
  Synthetic
acagacugugcuuuucacug

SEQ ID NO: 810124 - RNA, 20 nt, Artificial Sequence
  Synthetic
aaugauaaaauuuuucacug

SEQ ID NO: 810125 - RNA, 20 nt, Artificial Sequence
  Synthetic
ucaugauaucaaaaagacug

SEQ ID NO: 810126 - RNA, 20 nt, Artificial Sequence
  Synthetic
uuacuuugagaaaaagacug

SEQ ID NO: 810127 - RNA, 20 nt, Artificial Sequence
  Synthetic
uguagguuguagaaagacug

SEQ ID NO: 810128 - RNA, 20 nt, Artificial Sequence
  Synthetic
uccugauaaggccaagacug

SEQ ID NO: 810129 - RNA, 20 nt, Artificial Sequence
  Synthetic
ugcaaaauaaaagaagacug

SEQ ID NO: 810130 - RNA, 20 nt, Artificial Sequence
  Synthetic
aauccuuuguugccagacug

SEQ ID NO: 810131 - RNA, 20 nt, Artificial Sequence
  Synthetic
agaguaugaguuccagacug

SEQ ID NO: 810132 - RNA, 20 nt, Artificial Sequence
  Synthetic
aagcuggcuuuuccagacug

SEQ ID NO: 810133 - RNA, 20 nt, Artificial Sequence
  Synthetic
aggacuccggaggcagacug

SEQ ID NO: 810134 - RNA, 20 nt, Artificial Sequence
  Synthetic
uccagucauaaaagagacug

SEQ ID NO: 810135 - RNA, 20 nt, Artificial Sequence
  Synthetic
uaaggcagaagaagagacug

SEQ ID NO: 810136 - RNA, 20 nt, Artificial Sequence
  Synthetic
uuaguaugaauaagagacug

SEQ ID NO: 810137 - RNA, 20 nt, Artificial Sequence
  Synthetic
aaagaacuucccugagacug

SEQ ID NO: 810138 - RNA, 20 nt, Artificial Sequence
  Synthetic
augcauguuuucugagacug

SEQ ID NO: 810139 - RNA, 20 nt, Artificial Sequence
  Synthetic
cuuagccuguccauagacug

SEQ ID NO: 810140 - RNA, 20 nt, Artificial Sequence
  Synthetic
agggaagaaacaguagacug

SEQ ID NO: 810141 - RNA, 20 nt, Artificial Sequence
  Synthetic
uucagauacuauuuagacug

SEQ ID NO: 810142 - RNA, 20 nt, Artificial Sequence
  Synthetic
auuuaggaagguuuagacug

SEQ ID NO: 810143 - RNA, 20 nt, Artificial Sequence
  Synthetic
auuaaaaauguagccgacug

SEQ ID NO: 810144 - RNA, 20 nt, Artificial Sequence
  Synthetic
aaugaaaguugaaaggacug

SEQ ID NO: 810145 - RNA, 20 nt, Artificial Sequence
  Synthetic
agagagagagaagaggacug

SEQ ID NO: 810146 - RNA, 20 nt, Artificial Sequence
  Synthetic
agguugaauagagaggacug

SEQ ID NO: 810147 - RNA, 20 nt, Artificial Sequence
  Synthetic
acccaaagccacagggacug

SEQ ID NO: 810148 - RNA, 20 nt, Artificial Sequence
  Synthetic
aaugggcaaaaacgggacug

SEQ ID NO: 810149 - RNA, 20 nt, Artificial Sequence
  Synthetic
auaucacacucuggggacug

SEQ ID NO: 810150 - RNA, 20 nt, Artificial Sequence
  Synthetic
caagcugggaguggggacug

SEQ ID NO: 810151 - RNA, 20 nt, Artificial Sequence
  Synthetic
uacacaaaaagacuggacug

SEQ ID NO: 810152 - RNA, 20 nt, Artificial Sequence
  Synthetic
auucugucugcaaaugacug

SEQ ID NO: 810153 - RNA, 20 nt, Artificial Sequence
  Synthetic
aaaauuugaguaaaugacug

SEQ ID NO: 810154 - RNA, 20 nt, Artificial Sequence
  Synthetic
aagaaagaacacaaugacug

SEQ ID NO: 810155 - RNA, 20 nt, Artificial Sequence
  Synthetic
cuuauaguuccacaugacug

SEQ ID NO: 810156 - RNA, 20 nt, Artificial Sequence
  Synthetic
aggguugcuucucaugacug

SEQ ID NO: 810157 - RNA, 20 nt, Artificial Sequence
  Synthetic
auucagucaagagaugacug

SEQ ID NO: 810158 - RNA, 20 nt, Artificial Sequence
  Synthetic
uauaugagcagaacugacug

SEQ ID NO: 810159 - RNA, 20 nt, Artificial Sequence
  Synthetic
uauugggucuuaacugacug

SEQ ID NO: 810160 - RNA, 20 nt, Artificial Sequence
  Synthetic
ccgugcacaggcacugacug

SEQ ID NO: 810161 - RNA, 20 nt, Artificial Sequence
  Synthetic
uaucuauaagccccugacug

SEQ ID NO: 810162 - RNA, 20 nt, Artificial Sequence
  Synthetic
ccaaguaaggagucugacug

SEQ ID NO: 810163 - RNA, 20 nt, Artificial Sequence
  Synthetic
agacaccuagggggugacug

SEQ ID NO: 810164 - RNA, 20 nt, Artificial Sequence
  Synthetic
aagagugugggaguugacug

SEQ ID NO: 810165 - RNA, 20 nt, Artificial Sequence
  Synthetic
cacagaaacagaaaauacug

SEQ ID NO: 810166 - RNA, 20 nt, Artificial Sequence
  Synthetic
auuaaacggaacaaauacug

SEQ ID NO: 810167 - RNA, 20 nt, Artificial Sequence
  Synthetic
cauucauucuacaaauacug

SEQ ID NO: 810168 - RNA, 20 nt, Artificial Sequence
  Synthetic
aauagacaauucaaauacug

SEQ ID NO: 810169 - RNA, 20 nt, Artificial Sequence
  Synthetic
ucuggagacaaggaauacug

SEQ ID NO: 810170 - RNA, 20 nt, Artificial Sequence
  Synthetic
uaagaauuuggggaauacug

SEQ ID NO: 810171 - RNA, 20 nt, Artificial Sequence
  Synthetic
uuaauuuugguaucauacug

SEQ ID NO: 810172 - RNA, 20 nt, Artificial Sequence
  Synthetic
cuauaaaauuagucauacug

SEQ ID NO: 810173 - RNA, 20 nt, Artificial Sequence
  Synthetic
ugacgguuggguagauacug

SEQ ID NO: 810174 - RNA, 20 nt, Artificial Sequence
  Synthetic
ugacagagaaaaggauacug

SEQ ID NO: 810175 - RNA, 20 nt, Artificial Sequence
  Synthetic
ccaaucccccauggauacug

SEQ ID NO: 810176 - RNA, 20 nt, Artificial Sequence
  Synthetic
aagccuggcuuuggauacug

SEQ ID NO: 810177 - RNA, 20 nt, Artificial Sequence
  Synthetic
aaaaugaguuaaugauacug

SEQ ID NO: 810178 - RNA, 20 nt, Artificial Sequence
  Synthetic
auauuuauugggugauacug

SEQ ID NO: 810179 - RNA, 20 nt, Artificial Sequence
  Synthetic
aaugcauagaauugauacug

SEQ ID NO: 810180 - RNA, 20 nt, Artificial Sequence
  Synthetic
ucauuucuucuucuauacug

SEQ ID NO: 810181 - RNA, 20 nt, Artificial Sequence
  Synthetic
uagauacacaagguauacug

SEQ ID NO: 810182 - RNA, 20 nt, Artificial Sequence
  Synthetic
cuaauuucccugguauacug

SEQ ID NO: 810183 - RNA, 20 nt, Artificial Sequence
  Synthetic
uuuaucggugcauuauacug

SEQ ID NO: 810184 - RNA, 20 nt, Artificial Sequence
  Synthetic
cuacuuuuuccccacuacug

SEQ ID NO: 810185 - RNA, 20 nt, Artificial Sequence
  Synthetic
uaugcucccugccacuacug

SEQ ID NO: 810186 - RNA, 20 nt, Artificial Sequence
  Synthetic
auacagcaauuccacuacug

SEQ ID NO: 810187 - RNA, 20 nt, Artificial Sequence
  Synthetic
uucauucauagcaccuacug

SEQ ID NO: 810188 - RNA, 20 nt, Artificial Sequence
  Synthetic
aagggacaguacagcuacug

SEQ ID NO: 810189 - RNA, 20 nt, Artificial Sequence
  Synthetic
acugauuuucaaggcuacug

SEQ ID NO: 810190 - RNA, 20 nt, Artificial Sequence
  Synthetic
ccacacugcaguugcuacug

SEQ ID NO: 810191 - RNA, 20 nt, Artificial Sequence
  Synthetic
uccucucccaaaaucuacug

SEQ ID NO: 810192 - RNA, 20 nt, Artificial Sequence
  Synthetic
cauuuuugaaagaucuacug

SEQ ID NO: 810193 - RNA, 20 nt, Artificial Sequence
  Synthetic
cuacagagauuuaucuacug

SEQ ID NO: 810194 - RNA, 20 nt, Artificial Sequence
  Synthetic
ugcuucacauaccucuacug

SEQ ID NO: 810195 - RNA, 20 nt, Artificial Sequence
  Synthetic
cauucuaaaguggucuacug

SEQ ID NO: 810196 - RNA, 20 nt, Artificial Sequence
  Synthetic
auacuauaugcuaaguacug

SEQ ID NO: 810197 - RNA, 20 nt, Artificial Sequence
  Synthetic
aggcuuucugguaaguacug

SEQ ID NO: 810198 - RNA, 20 nt, Artificial Sequence
  Synthetic
uuucuaggaaaggaguacug

SEQ ID NO: 810199 - RNA, 20 nt, Artificial Sequence
  Synthetic
augaaugugagcugguacug

SEQ ID NO: 810200 - RNA, 20 nt, Artificial Sequence
  Synthetic
cauuuaggaagcauguacug

SEQ ID NO: 810201 - RNA, 20 nt, Artificial Sequence
  Synthetic
uuguacuauaacuuguacug

SEQ ID NO: 810202 - RNA, 20 nt, Artificial Sequence
  Synthetic
uuuguuguguacaauuacug

SEQ ID NO: 810203 - RNA, 20 nt, Artificial Sequence
  Synthetic
aauaauaauacuaauuacug

SEQ ID NO: 810204 - RNA, 20 nt, Artificial Sequence
  Synthetic
cucuguucaugccauuacug

SEQ ID NO: 810205 - RNA, 20 nt, Artificial Sequence
  Synthetic
cguaauaguauugauuacug

SEQ ID NO: 810206 - RNA, 20 nt, Artificial Sequence
  Synthetic
aggggauuacuauauuacug

SEQ ID NO: 810207 - RNA, 20 nt, Artificial Sequence
  Synthetic
caaaucuuuacaacuuacug

SEQ ID NO: 810208 - RNA, 20 nt, Artificial Sequence
  Synthetic
uaauuuuuguauucuuacug

SEQ ID NO: 810209 - RNA, 20 nt, Artificial Sequence
  Synthetic
cuugcacugcaauguuacug

SEQ ID NO: 810210 - RNA, 20 nt, Artificial Sequence
  Synthetic
agacagaauagguguuacug

SEQ ID NO: 810211 - RNA, 20 nt, Artificial Sequence
  Synthetic
aggagucacuuuuguuacug

SEQ ID NO: 810212 - RNA, 20 nt, Artificial Sequence
  Synthetic
cuagaagaggacauuuacug

SEQ ID NO: 810213 - RNA, 20 nt, Artificial Sequence
  Synthetic
acuucagaaaccauuuacug

SEQ ID NO: 810214 - RNA, 20 nt, Artificial Sequence
  Synthetic
ccuuuaugaaccauuuacug

SEQ ID NO: 810215 - RNA, 20 nt, Artificial Sequence
  Synthetic
auuuucuuuuuucuuuacug

SEQ ID NO: 810216 - RNA, 20 nt, Artificial Sequence
  Synthetic
cugcccucucauguuuacug

SEQ ID NO: 810217 - RNA, 20 nt, Artificial Sequence
  Synthetic
cuuaaucgagucuuuuacug

SEQ ID NO: 810218 - RNA, 20 nt, Artificial Sequence
  Synthetic
ccaaaauuccuuuuuuacug

SEQ ID NO: 810219 - RNA, 20 nt, Artificial Sequence
  Synthetic
uucucauucuuuuuuuacug

SEQ ID NO: 810220 - RNA, 20 nt, Artificial Sequence
  Synthetic
uauggagaugcaaaaaccug

SEQ ID NO: 810221 - RNA, 20 nt, Artificial Sequence
  Synthetic
acuguaacuuuaaaaaccug

SEQ ID NO: 810222 - RNA, 20 nt, Artificial Sequence
  Synthetic
cauucgugaaagaaaaccug

SEQ ID NO: 810223 - RNA, 20 nt, Artificial Sequence
  Synthetic
acaggucaggugaaaaccug

SEQ ID NO: 810224 - RNA, 20 nt, Artificial Sequence
  Synthetic
ucugaucuuugacaaaccug

SEQ ID NO: 810225 - RNA, 20 nt, Artificial Sequence
  Synthetic
aacucuuucuugcaaaccug

SEQ ID NO: 810226 - RNA, 20 nt, Artificial Sequence
  Synthetic
augucaauggaucaaaccug

SEQ ID NO: 810227 - RNA, 20 nt, Artificial Sequence
  Synthetic
cuuuucugaagagaaaccug

SEQ ID NO: 810228 - RNA, 20 nt, Artificial Sequence
  Synthetic
auaugucaggaauaaaccug

SEQ ID NO: 810229 - RNA, 20 nt, Artificial Sequence
  Synthetic
aaagcaauugcaacaaccug

SEQ ID NO: 810230 - RNA, 20 nt, Artificial Sequence
  Synthetic
uacucuggugacacaaccug

SEQ ID NO: 810231 - RNA, 20 nt, Artificial Sequence
  Synthetic
ugaauuuucaccacaaccug

SEQ ID NO: 810232 - RNA, 20 nt, Artificial Sequence
  Synthetic
auucccuuuacuccaaccug

SEQ ID NO: 810233 - RNA, 20 nt, Artificial Sequence
  Synthetic
auaugcuuaacuucaaccug

SEQ ID NO: 810234 - RNA, 20 nt, Artificial Sequence
  Synthetic
caugagcaugauggaaccug

SEQ ID NO: 810235 - RNA, 20 nt, Artificial Sequence
  Synthetic
ugacaacauggaugaaccug

SEQ ID NO: 810236 - RNA, 20 nt, Artificial Sequence
  Synthetic
uauaaaggauuuugaaccug

SEQ ID NO: 810237 - RNA, 20 nt, Artificial Sequence
  Synthetic
cugaggugguagaacaccug

SEQ ID NO: 810238 - RNA, 20 nt, Artificial Sequence
  Synthetic
uugaaaucaaggaacaccug

SEQ ID NO: 810239 - RNA, 20 nt, Artificial Sequence
  Synthetic
aaauuaauuauucacaccug

SEQ ID NO: 810240 - RNA, 20 nt, Artificial Sequence
  Synthetic
agccucuccuuugacaccug

SEQ ID NO: 810241 - RNA, 20 nt, Artificial Sequence
  Synthetic
cacauccauaacuacaccug

SEQ ID NO: 810242 - RNA, 20 nt, Artificial Sequence
  Synthetic
accccagaagcaaccaccug

SEQ ID NO: 810243 - RNA, 20 nt, Artificial Sequence
  Synthetic
ugagacaggcagaccaccug

SEQ ID NO: 810244 - RNA, 20 nt, Artificial Sequence
  Synthetic
cgguagccauuagccaccug

SEQ ID NO: 810245 - RNA, 20 nt, Artificial Sequence
  Synthetic
uuuuaagcuugaagcaccug

SEQ ID NO: 810246 - RNA, 20 nt, Artificial Sequence
  Synthetic
augugcaucagaaucaccug

SEQ ID NO: 810247 - RNA, 20 nt, Artificial Sequence
  Synthetic
uugcguaucugaaucaccug

SEQ ID NO: 810248 - RNA, 20 nt, Artificial Sequence
  Synthetic
cggggcgggcgcaucaccug

SEQ ID NO: 810249 - RNA, 20 nt, Artificial Sequence
  Synthetic
cguggagggcagaucaccug

SEQ ID NO: 810250 - RNA, 20 nt, Artificial Sequence
  Synthetic
cgaggugggcagaucaccug

SEQ ID NO: 810251 - RNA, 20 nt, Artificial Sequence
  Synthetic
ugaggugggcagaucaccug

SEQ ID NO: 810252 - RNA, 20 nt, Artificial Sequence
  Synthetic
uucaagcuauagaucaccug

SEQ ID NO: 810253 - RNA, 20 nt, Artificial Sequence
  Synthetic
cgaggcaaacggaucaccug

SEQ ID NO: 810254 - RNA, 20 nt, Artificial Sequence
  Synthetic
caaggugaacggaucaccug

SEQ ID NO: 810255 - RNA, 20 nt, Artificial Sequence
  Synthetic
caaggcaggcggaucaccug

SEQ ID NO: 810256 - RNA, 20 nt, Artificial Sequence
  Synthetic
cgaggcaggcggaucaccug

SEQ ID NO: 810257 - RNA, 20 nt, Artificial Sequence
  Synthetic
ugaggcaggcggaucaccug

SEQ ID NO: 810258 - RNA, 20 nt, Artificial Sequence
  Synthetic
caaggugggcggaucaccug

SEQ ID NO: 810259 - RNA, 20 nt, Artificial Sequence
  Synthetic
cugaagcgauggaucaccug

SEQ ID NO: 810260 - RNA, 20 nt, Artificial Sequence
  Synthetic
caaggugaguggaucaccug

SEQ ID NO: 810261 - RNA, 20 nt, Artificial Sequence
  Synthetic
cgaggcagguggaucaccug

SEQ ID NO: 810262 - RNA, 20 nt, Artificial Sequence
  Synthetic
ugaggcagguggaucaccug

SEQ ID NO: 810263 - RNA, 20 nt, Artificial Sequence
  Synthetic
ugaggaggguggaucaccug

SEQ ID NO: 810264 - RNA, 20 nt, Artificial Sequence
  Synthetic
cgaggcggguggaucaccug

SEQ ID NO: 810265 - RNA, 20 nt, Artificial Sequence
  Synthetic
cgagauggguggaucaccug

SEQ ID NO: 810266 - RNA, 20 nt, Artificial Sequence
  Synthetic
agaaguggguggaucaccug

SEQ ID NO: 810267 - RNA, 20 nt, Artificial Sequence
  Synthetic
cuacguggguggaucaccug

SEQ ID NO: 810268 - RNA, 20 nt, Artificial Sequence
  Synthetic
cgagguggguggaucaccug

SEQ ID NO: 810269 - RNA, 20 nt, Artificial Sequence
  Synthetic
ugagguggguggaucaccug

SEQ ID NO: 810270 - RNA, 20 nt, Artificial Sequence
  Synthetic
cgaggcagccugaucaccug

SEQ ID NO: 810271 - RNA, 20 nt, Artificial Sequence
  Synthetic
ugaggcggguguaucaccug

SEQ ID NO: 810272 - RNA, 20 nt, Artificial Sequence
  Synthetic
aaagguaggacacucaccug

SEQ ID NO: 810273 - RNA, 20 nt, Artificial Sequence
  Synthetic
ccuguugaugaggucaccug

SEQ ID NO: 810274 - RNA, 20 nt, Artificial Sequence
  Synthetic
agcaaauucuaaaagaccug

SEQ ID NO: 810275 - RNA, 20 nt, Artificial Sequence
  Synthetic
auugggugugucaagaccug

SEQ ID NO: 810276 - RNA, 20 nt, Artificial Sequence
  Synthetic
uacauuauuccacagaccug

SEQ ID NO: 810277 - RNA, 20 nt, Artificial Sequence
  Synthetic
aucacgugguucaggaccug

SEQ ID NO: 810278 - RNA, 20 nt, Artificial Sequence
  Synthetic
uggcucuugcauaggaccug

SEQ ID NO: 810279 - RNA, 20 nt, Artificial Sequence
  Synthetic
aaugacuucagugggaccug

SEQ ID NO: 810280 - RNA, 20 nt, Artificial Sequence
  Synthetic
aguuuaauucauuggaccug

SEQ ID NO: 810281 - RNA, 20 nt, Artificial Sequence
  Synthetic
aacauaauugcaaugaccug

SEQ ID NO: 810282 - RNA, 20 nt, Artificial Sequence
  Synthetic
cucagcauccuaaugaccug

SEQ ID NO: 810283 - RNA, 20 nt, Artificial Sequence
  Synthetic
acucuuugccacaugaccug

SEQ ID NO: 810284 - RNA, 20 nt, Artificial Sequence
  Synthetic
aauauauguauucugaccug

SEQ ID NO: 810285 - RNA, 20 nt, Artificial Sequence
  Synthetic
cuuucuuuauccuugaccug

SEQ ID NO: 810286 - RNA, 20 nt, Artificial Sequence
  Synthetic
uccugaguuagaaauaccug

SEQ ID NO: 810287 - RNA, 20 nt, Artificial Sequence
  Synthetic
augcuagaugaggauaccug

SEQ ID NO: 810288 - RNA, 20 nt, Artificial Sequence
  Synthetic
caaauacccagugcuaccug

SEQ ID NO: 810289 - RNA, 20 nt, Artificial Sequence
  Synthetic
cuguuauauuuugguaccug

SEQ ID NO: 810290 - RNA, 20 nt, Artificial Sequence
  Synthetic
auccagacuauaauuaccug

SEQ ID NO: 810291 - RNA, 20 nt, Artificial Sequence
  Synthetic
ugagguggguggauuaccug

SEQ ID NO: 810292 - RNA, 20 nt, Artificial Sequence
  Synthetic
augguucuggagcuuaccug

SEQ ID NO: 810293 - RNA, 20 nt, Artificial Sequence
  Synthetic
uauaauauaauaguuaccug

SEQ ID NO: 810294 - RNA, 20 nt, Artificial Sequence
  Synthetic
aguagaaggaugguuaccug

SEQ ID NO: 810295 - RNA, 20 nt, Artificial Sequence
  Synthetic
uuucacuuauaugaacccug

SEQ ID NO: 810296 - RNA, 20 nt, Artificial Sequence
  Synthetic
uggguggccaucacacccug

SEQ ID NO: 810297 - RNA, 20 nt, Artificial Sequence
  Synthetic
uacgggaacaauagacccug

SEQ ID NO: 810298 - RNA, 20 nt, Artificial Sequence
  Synthetic
ccaaaugucucgguacccug

SEQ ID NO: 810299 - RNA, 20 nt, Artificial Sequence
  Synthetic
cuugguaagcuccaccccug

SEQ ID NO: 810300 - RNA, 20 nt, Artificial Sequence
  Synthetic
auauauuaaauuucccccug

SEQ ID NO: 810301 - RNA, 20 nt, Artificial Sequence
  Synthetic
cacccgccaacaggccccug

SEQ ID NO: 810302 - RNA, 20 nt, Artificial Sequence
  Synthetic
uuucuaguucuaggccccug

SEQ ID NO: 810303 - RNA, 20 nt, Artificial Sequence
  Synthetic
caugauagagguugccccug

SEQ ID NO: 810304 - RNA, 20 nt, Artificial Sequence
  Synthetic
uaaacuggaacacagcccug

SEQ ID NO: 810305 - RNA, 20 nt, Artificial Sequence
  Synthetic
agcaaggguccccagcccug

SEQ ID NO: 810306 - RNA, 20 nt, Artificial Sequence
  Synthetic
cuggucacccaagagcccug

SEQ ID NO: 810307 - RNA, 20 nt, Artificial Sequence
  Synthetic
cagcaagugcaaaggcccug

SEQ ID NO: 810308 - RNA, 20 nt, Artificial Sequence
  Synthetic
ucagcucaggcaaggcccug

SEQ ID NO: 810309 - RNA, 20 nt, Artificial Sequence
  Synthetic
ugacacauuuuaaggcccug

SEQ ID NO: 810310 - RNA, 20 nt, Artificial Sequence
  Synthetic
cuuuaugcaagcaggcccug

SEQ ID NO: 810311 - RNA, 20 nt, Artificial Sequence
  Synthetic
ugauauuuauuuaggcccug

SEQ ID NO: 810312 - RNA, 20 nt, Artificial Sequence
  Synthetic
uucaaagggcuucugcccug

SEQ ID NO: 810313 - RNA, 20 nt, Artificial Sequence
  Synthetic
ccgugagggacugugcccug

SEQ ID NO: 810314 - RNA, 20 nt, Artificial Sequence
  Synthetic
caaaugccaccuuugcccug

SEQ ID NO: 810315 - RNA, 20 nt, Artificial Sequence
  Synthetic
ucaucuccagguuugcccug

SEQ ID NO: 810316 - RNA, 20 nt, Artificial Sequence
  Synthetic
uuucuaguucuagaucccug

SEQ ID NO: 810317 - RNA, 20 nt, Artificial Sequence
  Synthetic
ccaugagcaaaaacucccug

SEQ ID NO: 810318 - RNA, 20 nt, Artificial Sequence
  Synthetic
uaauaaacugugacucccug

SEQ ID NO: 810319 - RNA, 20 nt, Artificial Sequence
  Synthetic
uccccugccuguacucccug

SEQ ID NO: 810320 - RNA, 20 nt, Artificial Sequence
  Synthetic
ccaugaguaaaagcucccug

SEQ ID NO: 810321 - RNA, 20 nt, Artificial Sequence
  Synthetic
auaauuuauauuucucccug

SEQ ID NO: 810322 - RNA, 20 nt, Artificial Sequence
  Synthetic
ucaaauaaaaucagucccug

SEQ ID NO: 810323 - RNA, 20 nt, Artificial Sequence
  Synthetic
ugacuccccaucagucccug

SEQ ID NO: 810324 - RNA, 20 nt, Artificial Sequence
  Synthetic
cuuaccauccucagucccug

SEQ ID NO: 810325 - RNA, 20 nt, Artificial Sequence
  Synthetic
accacacaagcaauucccug

SEQ ID NO: 810326 - RNA, 20 nt, Artificial Sequence
  Synthetic
uucauauaacauguucccug

SEQ ID NO: 810327 - RNA, 20 nt, Artificial Sequence
  Synthetic
cuuugaggaguauuucccug

SEQ ID NO: 810328 - RNA, 20 nt, Artificial Sequence
  Synthetic
acacucaguuuauuucccug

SEQ ID NO: 810329 - RNA, 20 nt, Artificial Sequence
  Synthetic
augguuguaaguuuucccug

SEQ ID NO: 810330 - RNA, 20 nt, Artificial Sequence
  Synthetic
cguuuuuaaagcaaagccug

SEQ ID NO: 810331 - RNA, 20 nt, Artificial Sequence
  Synthetic
auaguugagaagaaagccug

SEQ ID NO: 810332 - RNA, 20 nt, Artificial Sequence
  Synthetic
acggcagaaguuaaagccug

SEQ ID NO: 810333 - RNA, 20 nt, Artificial Sequence
  Synthetic
ccaugaauggaagaagccug

SEQ ID NO: 810334 - RNA, 20 nt, Artificial Sequence
  Synthetic
uuuccuugaauuuaagccug

SEQ ID NO: 810335 - RNA, 20 nt, Artificial Sequence
  Synthetic
uagaaaggagaaacagccug

SEQ ID NO: 810336 - RNA, 20 nt, Artificial Sequence
  Synthetic
cgccauugcacuccagccug

SEQ ID NO: 810337 - RNA, 20 nt, Artificial Sequence
  Synthetic
cgccacuguacuccagccug

SEQ ID NO: 810338 - RNA, 20 nt, Artificial Sequence
  Synthetic
agaaucucaacugcagccug

SEQ ID NO: 810339 - RNA, 20 nt, Artificial Sequence
  Synthetic
caaaggacauagucagccug

SEQ ID NO: 810340 - RNA, 20 nt, Artificial Sequence
  Synthetic
ugcauucaggauucagccug

SEQ ID NO: 810341 - RNA, 20 nt, Artificial Sequence
  Synthetic
uuuaaagauuaaggagccug

SEQ ID NO: 810342 - RNA, 20 nt, Artificial Sequence
  Synthetic
cccagcuacucaggagccug

SEQ ID NO: 810343 - RNA, 20 nt, Artificial Sequence
  Synthetic
cccagcuacucgggagccug

SEQ ID NO: 810344 - RNA, 20 nt, Artificial Sequence
  Synthetic
cccagcacuuugggagccug

SEQ ID NO: 810345 - RNA, 20 nt, Artificial Sequence
  Synthetic
uccaugugguguugagccug

SEQ ID NO: 810346 - RNA, 20 nt, Artificial Sequence
  Synthetic
ugacuuugaauccuagccug

SEQ ID NO: 810347 - RNA, 20 nt, Artificial Sequence
  Synthetic
ugaucaucuuagguagccug

SEQ ID NO: 810348 - RNA, 20 nt, Artificial Sequence
  Synthetic
aaaaagaggaaguuagccug

SEQ ID NO: 810349 - RNA, 20 nt, Artificial Sequence
  Synthetic
ugcgugguggcgggcgccug

SEQ ID NO: 810350 - RNA, 20 nt, Artificial Sequence
  Synthetic
caggucugagaugaggccug

SEQ ID NO: 810351 - RNA, 20 nt, Artificial Sequence
  Synthetic
cuaacgccauuuuaggccug

SEQ ID NO: 810352 - RNA, 20 nt, Artificial Sequence
  Synthetic
auauuggccuuuuaggccug

SEQ ID NO: 810353 - RNA, 20 nt, Artificial Sequence
  Synthetic
aguguauuagucagggccug

SEQ ID NO: 810354 - RNA, 20 nt, Artificial Sequence
  Synthetic
cuauugacaaugggggccug

SEQ ID NO: 810355 - RNA, 20 nt, Artificial Sequence
  Synthetic
cacugguucaucugggccug

SEQ ID NO: 810356 - RNA, 20 nt, Artificial Sequence
  Synthetic
uacaugugguguugggccug

SEQ ID NO: 810357 - RNA, 20 nt, Artificial Sequence
  Synthetic
ccuacggaggguauggccug

SEQ ID NO: 810358 - RNA, 20 nt, Artificial Sequence
  Synthetic
cuuuacucugcccuggccug

SEQ ID NO: 810359 - RNA, 20 nt, Artificial Sequence
  Synthetic
cuaguucuucugcuggccug

SEQ ID NO: 810360 - RNA, 20 nt, Artificial Sequence
  Synthetic
acuuacauccauguggccug

SEQ ID NO: 810361 - RNA, 20 nt, Artificial Sequence
  Synthetic
aauggguugaguguggccug

SEQ ID NO: 810362 - RNA, 20 nt, Artificial Sequence
  Synthetic
ugacuuuucucagaugccug

SEQ ID NO: 810363 - RNA, 20 nt, Artificial Sequence
  Synthetic
auucuaguucuagaugccug

SEQ ID NO: 810364 - RNA, 20 nt, Artificial Sequence
  Synthetic
ugggaauaguucacugccug

SEQ ID NO: 810365 - RNA, 20 nt, Artificial Sequence
  Synthetic
uucagccaggggccugccug

SEQ ID NO: 810366 - RNA, 20 nt, Artificial Sequence
  Synthetic
auggcuguauuagcugccug

SEQ ID NO: 810367 - RNA, 20 nt, Artificial Sequence
  Synthetic
cacugaaugagggcugccug

SEQ ID NO: 810368 - RNA, 20 nt, Artificial Sequence
  Synthetic
cacauuauuccugcugccug

SEQ ID NO: 810369 - RNA, 20 nt, Artificial Sequence
  Synthetic
aguuugagaagcauugccug

SEQ ID NO: 810370 - RNA, 20 nt, Artificial Sequence
  Synthetic
uuucagcugcaccuugccug

SEQ ID NO: 810371 - RNA, 20 nt, Artificial Sequence
  Synthetic
auguuuaaugaauuugccug

SEQ ID NO: 810372 - RNA, 20 nt, Artificial Sequence
  Synthetic
cacuauuuaauuuuugccug

SEQ ID NO: 810373 - RNA, 20 nt, Artificial Sequence
  Synthetic
uaagugauauaaaaauccug

SEQ ID NO: 810374 - RNA, 20 nt, Artificial Sequence
  Synthetic
cacuagccucuguaauccug

SEQ ID NO: 810375 - RNA, 20 nt, Artificial Sequence
  Synthetic
ccuuuuguucuugcauccug

SEQ ID NO: 810376 - RNA, 20 nt, Artificial Sequence
  Synthetic
cauguuaaaaagucauccug

SEQ ID NO: 810377 - RNA, 20 nt, Artificial Sequence
  Synthetic
aaaaucucagagagauccug

SEQ ID NO: 810378 - RNA, 20 nt, Artificial Sequence
  Synthetic
auggugguuauuagauccug

SEQ ID NO: 810379 - RNA, 20 nt, Artificial Sequence
  Synthetic
auaaccaaacagugauccug

SEQ ID NO: 810380 - RNA, 20 nt, Artificial Sequence
  Synthetic
aacuuucuucucuuauccug

SEQ ID NO: 810381 - RNA, 20 nt, Artificial Sequence
  Synthetic
uuccuuuuucuuuuauccug

SEQ ID NO: 810382 - RNA, 20 nt, Artificial Sequence
  Synthetic
caccuggucucaaacuccug

SEQ ID NO: 810383 - RNA, 20 nt, Artificial Sequence
  Synthetic
uguagccccagcuacuccug

SEQ ID NO: 810384 - RNA, 20 nt, Artificial Sequence
  Synthetic
aacuauuuuuguaccuccug

SEQ ID NO: 810385 - RNA, 20 nt, Artificial Sequence
  Synthetic
caauuuagagcugccuccug

SEQ ID NO: 810386 - RNA, 20 nt, Artificial Sequence
  Synthetic
agacuucagagauccuccug

SEQ ID NO: 810387 - RNA, 20 nt, Artificial Sequence
  Synthetic
aggcauuugcuuggcuccug

SEQ ID NO: 810388 - RNA, 20 nt, Artificial Sequence
  Synthetic
ucagaaaggccagucuccug

SEQ ID NO: 810389 - RNA, 20 nt, Artificial Sequence
  Synthetic
uuuugagacagggucuccug

SEQ ID NO: 810390 - RNA, 20 nt, Artificial Sequence
  Synthetic
acauuaccaaaugucuccug

SEQ ID NO: 810391 - RNA, 20 nt, Artificial Sequence
  Synthetic
aauauuacuaaauucuccug

SEQ ID NO: 810392 - RNA, 20 nt, Artificial Sequence
  Synthetic
cuuugagaagcuuucuccug

SEQ ID NO: 810393 - RNA, 20 nt, Artificial Sequence
  Synthetic
auauuuccugcuuucuccug

SEQ ID NO: 810394 - RNA, 20 nt, Artificial Sequence
  Synthetic
agcuaucuugcuuucuccug

SEQ ID NO: 810395 - RNA, 20 nt, Artificial Sequence
  Synthetic
uucagcucucuuuucuccug

SEQ ID NO: 810396 - RNA, 20 nt, Artificial Sequence
  Synthetic
aucagcagguaccaguccug

SEQ ID NO: 810397 - RNA, 20 nt, Artificial Sequence
  Synthetic
uuauugagcgcuuaguccug

SEQ ID NO: 810398 - RNA, 20 nt, Artificial Sequence
  Synthetic
uaauaauaaaaccuguccug

SEQ ID NO: 810399 - RNA, 20 nt, Artificial Sequence
  Synthetic
aucagaaugaaagauuccug

SEQ ID NO: 810400 - RNA, 20 nt, Artificial Sequence
  Synthetic
cuugagaaaguuuauuccug

SEQ ID NO: 810401 - RNA, 20 nt, Artificial Sequence
  Synthetic
auggcuuaaugcccuuccug

SEQ ID NO: 810402 - RNA, 20 nt, Artificial Sequence
  Synthetic
aaaugccucgucccuuccug

SEQ ID NO: 810403 - RNA, 20 nt, Artificial Sequence
  Synthetic
cugggcgcuucuccuuccug

SEQ ID NO: 810404 - RNA, 20 nt, Artificial Sequence
  Synthetic
accaagauguuuccuuccug

SEQ ID NO: 810405 - RNA, 20 nt, Artificial Sequence
  Synthetic
cauagauugaaagcuuccug

SEQ ID NO: 810406 - RNA, 20 nt, Artificial Sequence
  Synthetic
acugcaaccuccgcuuccug

SEQ ID NO: 810407 - RNA, 20 nt, Artificial Sequence
  Synthetic
aaaagggcuaagucuuccug

SEQ ID NO: 810408 - RNA, 20 nt, Artificial Sequence
  Synthetic
caaucuggagaaaguuccug

SEQ ID NO: 810409 - RNA, 20 nt, Artificial Sequence
  Synthetic
ucuucaaugugaaguuccug

SEQ ID NO: 810410 - RNA, 20 nt, Artificial Sequence
  Synthetic
uuugacuggauuuguuccug

SEQ ID NO: 810411 - RNA, 20 nt, Artificial Sequence
  Synthetic
acagucuaccagauuuccug

SEQ ID NO: 810412 - RNA, 20 nt, Artificial Sequence
  Synthetic
ccaugauuauaaguuuccug

SEQ ID NO: 810413 - RNA, 20 nt, Artificial Sequence
  Synthetic
ccacgaugguaaguuuccug

SEQ ID NO: 810414 - RNA, 20 nt, Artificial Sequence
  Synthetic
ccaugauuguaaguuuccug

SEQ ID NO: 810415 - RNA, 20 nt, Artificial Sequence
  Synthetic
cuaugauuguaaguuuccug

SEQ ID NO: 810416 - RNA, 20 nt, Artificial Sequence
  Synthetic
cagugauuguaaguuuccug

SEQ ID NO: 810417 - RNA, 20 nt, Artificial Sequence
  Synthetic
ccaugauuuuaaguuuccug

SEQ ID NO: 810418 - RNA, 20 nt, Artificial Sequence
  Synthetic
acugcuauuucaguuuccug

SEQ ID NO: 810419 - RNA, 20 nt, Artificial Sequence
  Synthetic
cuucuuuuuguaguuuccug

SEQ ID NO: 810420 - RNA, 20 nt, Artificial Sequence
  Synthetic
cagcaagacuuuuuuuccug

SEQ ID NO: 810421 - RNA, 20 nt, Artificial Sequence
  Synthetic
auaauuuggaaaaaaagcug

SEQ ID NO: 810422 - RNA, 20 nt, Artificial Sequence
  Synthetic
uaaccaauggacaaaagcug

SEQ ID NO: 810423 - RNA, 20 nt, Artificial Sequence
  Synthetic
auuuaaauaaagaaaagcug

SEQ ID NO: 810424 - RNA, 20 nt, Artificial Sequence
  Synthetic
uagagguuuucacaaagcug

SEQ ID NO: 810425 - RNA, 20 nt, Artificial Sequence
  Synthetic
aaauacucagagcaaagcug

SEQ ID NO: 810426 - RNA, 20 nt, Artificial Sequence
  Synthetic
cacagauagcuucaaagcug

SEQ ID NO: 810427 - RNA, 20 nt, Artificial Sequence
  Synthetic
uaaacuaaagaagaaagcug

SEQ ID NO: 810428 - RNA, 20 nt, Artificial Sequence
  Synthetic
agaacucaaccaccaagcug

SEQ ID NO: 810429 - RNA, 20 nt, Artificial Sequence
  Synthetic
ccagcgcaccuagcaagcug

SEQ ID NO: 810430 - RNA, 20 nt, Artificial Sequence
  Synthetic
uauguuaagaccucaagcug

SEQ ID NO: 810431 - RNA, 20 nt, Artificial Sequence
  Synthetic
uuuuauagauguagaagcug

SEQ ID NO: 810432 - RNA, 20 nt, Artificial Sequence
  Synthetic
cccagcuacccaggaagcug

SEQ ID NO: 810433 - RNA, 20 nt, Artificial Sequence
  Synthetic
caaguugagaagggaagcug

SEQ ID NO: 810434 - RNA, 20 nt, Artificial Sequence
  Synthetic
cccagcuacucgggaagcug

SEQ ID NO: 810435 - RNA, 20 nt, Artificial Sequence
  Synthetic
cccagcuacuugggaagcug

SEQ ID NO: 810436 - RNA, 20 nt, Artificial Sequence
  Synthetic
cccaaggauuugggaagcug

SEQ ID NO: 810437 - RNA, 20 nt, Artificial Sequence
  Synthetic
cccagcacuuugggaagcug

SEQ ID NO: 810438 - RNA, 20 nt, Artificial Sequence
  Synthetic
uccagugcuuugggaagcug

SEQ ID NO: 810439 - RNA, 20 nt, Artificial Sequence
  Synthetic
ugcuaaacaguuugaagcug

SEQ ID NO: 810440 - RNA, 20 nt, Artificial Sequence
  Synthetic
cauuuccuaauuauaagcug

SEQ ID NO: 810441 - RNA, 20 nt, Artificial Sequence
  Synthetic
uuuaauuuuuuucuaagcug

SEQ ID NO: 810442 - RNA, 20 nt, Artificial Sequence
  Synthetic
ucagacaggaauaacagcug

SEQ ID NO: 810443 - RNA, 20 nt, Artificial Sequence
  Synthetic
cuuacaguuccacacagcug

SEQ ID NO: 810444 - RNA, 20 nt, Artificial Sequence
  Synthetic
aacuggaagaaucacagcug

SEQ ID NO: 810445 - RNA, 20 nt, Artificial Sequence
  Synthetic
ugugccuaucgggacagcug

SEQ ID NO: 810446 - RNA, 20 nt, Artificial Sequence
  Synthetic
uaagaaaacaaguacagcug

SEQ ID NO: 810447 - RNA, 20 nt, Artificial Sequence
  Synthetic
auuggcuugggguacagcug

SEQ ID NO: 810448 - RNA, 20 nt, Artificial Sequence
  Synthetic
auuuuggcaaguuacagcug

SEQ ID NO: 810449 - RNA, 20 nt, Artificial Sequence
  Synthetic
uuuauuccccuuuacagcug

SEQ ID NO: 810450 - RNA, 20 nt, Artificial Sequence
  Synthetic
cgugcccugcauaccagcug

SEQ ID NO: 810451 - RNA, 20 nt, Artificial Sequence
  Synthetic
acccagcaaauucccagcug

SEQ ID NO: 810452 - RNA, 20 nt, Artificial Sequence
  Synthetic
auaugaaaaugagccagcug

SEQ ID NO: 810453 - RNA, 20 nt, Artificial Sequence
  Synthetic
acaccauugcacuccagcug

SEQ ID NO: 810454 - RNA, 20 nt, Artificial Sequence
  Synthetic
aguagcacuaccagcagcug

SEQ ID NO: 810455 - RNA, 20 nt, Artificial Sequence
  Synthetic
agcagcacuccuagcagcug

SEQ ID NO: 810456 - RNA, 20 nt, Artificial Sequence
  Synthetic
ccacggggaaggggcagcug

SEQ ID NO: 810457 - RNA, 20 nt, Artificial Sequence
  Synthetic
agaaaugaacugugcagcug

SEQ ID NO: 810458 - RNA, 20 nt, Artificial Sequence
  Synthetic
uucucuucaggucucagcug

SEQ ID NO: 810459 - RNA, 20 nt, Artificial Sequence
  Synthetic
acucccugaacggucagcug

SEQ ID NO: 810460 - RNA, 20 nt, Artificial Sequence
  Synthetic
aauuaucaccaacagagcug

SEQ ID NO: 810461 - RNA, 20 nt, Artificial Sequence
  Synthetic
cgggcggacugccagagcug

SEQ ID NO: 810462 - RNA, 20 nt, Artificial Sequence
  Synthetic
caaguuaaguggcagagcug

SEQ ID NO: 810463 - RNA, 20 nt, Artificial Sequence
  Synthetic
acaguggcuuugccgagcug

SEQ ID NO: 810464 - RNA, 20 nt, Artificial Sequence
  Synthetic
agaccucuugacaggagcug

SEQ ID NO: 810465 - RNA, 20 nt, Artificial Sequence
  Synthetic
uagacaaggugcaggagcug

SEQ ID NO: 810466 - RNA, 20 nt, Artificial Sequence
  Synthetic
ucaaaggggcaagggagcug

SEQ ID NO: 810467 - RNA, 20 nt, Artificial Sequence
  Synthetic
cugacuuugaaacugagcug

SEQ ID NO: 810468 - RNA, 20 nt, Artificial Sequence
  Synthetic
uaauuaacuacccugagcug

SEQ ID NO: 810469 - RNA, 20 nt, Artificial Sequence
  Synthetic
auggacugaaaagugagcug

SEQ ID NO: 810470 - RNA, 20 nt, Artificial Sequence
  Synthetic
cacaagaaccgcuugagcug

SEQ ID NO: 810471 - RNA, 20 nt, Artificial Sequence
  Synthetic
uaaguucccacuuugagcug

SEQ ID NO: 810472 - RNA, 20 nt, Artificial Sequence
  Synthetic
caccaaacagcuuugagcug

SEQ ID NO: 810473 - RNA, 20 nt, Artificial Sequence
  Synthetic
uauugaauuguaaauagcug

SEQ ID NO: 810474 - RNA, 20 nt, Artificial Sequence
  Synthetic
cucagaaguaggcauagcug

SEQ ID NO: 810475 - RNA, 20 nt, Artificial Sequence
  Synthetic
cuagcaacacaguauagcug

SEQ ID NO: 810476 - RNA, 20 nt, Artificial Sequence
  Synthetic
aaagagucucugucuagcug

SEQ ID NO: 810477 - RNA, 20 nt, Artificial Sequence
  Synthetic
cucagccucaggaguagcug

SEQ ID NO: 810478 - RNA, 20 nt, Artificial Sequence
  Synthetic
cucagccuccugaguagcug

SEQ ID NO: 810479 - RNA, 20 nt, Artificial Sequence
  Synthetic
cuuagccuccugaguagcug

SEQ ID NO: 810480 - RNA, 20 nt, Artificial Sequence
  Synthetic
uggacagcauuuaguagcug

SEQ ID NO: 810481 - RNA, 20 nt, Artificial Sequence
  Synthetic
cucagccucccggguagcug

SEQ ID NO: 810482 - RNA, 20 nt, Artificial Sequence
  Synthetic
uuucacaauaacauuagcug

SEQ ID NO: 810483 - RNA, 20 nt, Artificial Sequence
  Synthetic
aaacaucugaagauuagcug

SEQ ID NO: 810484 - RNA, 20 nt, Artificial Sequence
  Synthetic
cugacuguauagcuuagcug

SEQ ID NO: 810485 - RNA, 20 nt, Artificial Sequence
  Synthetic
cagcauauuagaguuagcug

SEQ ID NO: 810486 - RNA, 20 nt, Artificial Sequence
  Synthetic
uuuaagaaacaauuuagcug

SEQ ID NO: 810487 - RNA, 20 nt, Artificial Sequence
  Synthetic
cccagcuacucaggacgcug

SEQ ID NO: 810488 - RNA, 20 nt, Artificial Sequence
  Synthetic
accugucugucuuuccgcug

SEQ ID NO: 810489 - RNA, 20 nt, Artificial Sequence
  Synthetic
uaauuauaagccaggcgcug

SEQ ID NO: 810490 - RNA, 20 nt, Artificial Sequence
  Synthetic
ugagggugggguuuucgcug

SEQ ID NO: 810491 - RNA, 20 nt, Artificial Sequence
  Synthetic
uacuuagauugaaaaggcug

SEQ ID NO: 810492 - RNA, 20 nt, Artificial Sequence
  Synthetic
cccagcuacccgaaaggcug

SEQ ID NO: 810493 - RNA, 20 nt, Artificial Sequence
  Synthetic
aguggagcuacccaaggcug

SEQ ID NO: 810494 - RNA, 20 nt, Artificial Sequence
  Synthetic
acacuaugcugccaaggcug

SEQ ID NO: 810495 - RNA, 20 nt, Artificial Sequence
  Synthetic
cccaucuucucagaaggcug

SEQ ID NO: 810496 - RNA, 20 nt, Artificial Sequence
  Synthetic
agagaagcgggggaaggcug

SEQ ID NO: 810497 - RNA, 20 nt, Artificial Sequence
  Synthetic
aauaacaaauuggaaggcug

SEQ ID NO: 810498 - RNA, 20 nt, Artificial Sequence
  Synthetic
cccagcuacuuggaaggcug

SEQ ID NO: 810499 - RNA, 20 nt, Artificial Sequence
  Synthetic
aguccuuuuugugaaggcug

SEQ ID NO: 810500 - RNA, 20 nt, Artificial Sequence
  Synthetic
ugcaacgcuacguaaggcug

SEQ ID NO: 810501 - RNA, 20 nt, Artificial Sequence
  Synthetic
acaaaacaaaacacaggcug

SEQ ID NO: 810502 - RNA, 20 nt, Artificial Sequence
  Synthetic
ucgcucugucacccaggcug

SEQ ID NO: 810503 - RNA, 20 nt, Artificial Sequence
  Synthetic
cacucuuguugcccaggcug

SEQ ID NO: 810504 - RNA, 20 nt, Artificial Sequence
  Synthetic
ccaaagcuuuguccaggcug

SEQ ID NO: 810505 - RNA, 20 nt, Artificial Sequence
  Synthetic
cccagcuacuuagcaggcug

SEQ ID NO: 810506 - RNA, 20 nt, Artificial Sequence
  Synthetic
cccagccacuaaagaggcug

SEQ ID NO: 810507 - RNA, 20 nt, Artificial Sequence
  Synthetic
cccagcuacucaagaggcug

SEQ ID NO: 810508 - RNA, 20 nt, Artificial Sequence
  Synthetic
cucagcuacucaagaggcug

SEQ ID NO: 810509 - RNA, 20 nt, Artificial Sequence
  Synthetic
acuuauuauggaagaggcug

SEQ ID NO: 810510 - RNA, 20 nt, Artificial Sequence
  Synthetic
uucugcaucuuaagaggcug

SEQ ID NO: 810511 - RNA, 20 nt, Artificial Sequence
  Synthetic
auggugguuaccagaggcug

SEQ ID NO: 810512 - RNA, 20 nt, Artificial Sequence
  Synthetic
uccaagcuucucagaggcug

SEQ ID NO: 810513 - RNA, 20 nt, Artificial Sequence
  Synthetic
auugcauuagagagaggcug

SEQ ID NO: 810514 - RNA, 20 nt, Artificial Sequence
  Synthetic
cccagcuacucgagaggcug

SEQ ID NO: 810515 - RNA, 20 nt, Artificial Sequence
  Synthetic
cacuucuguaugagaggcug

SEQ ID NO: 810516 - RNA, 20 nt, Artificial Sequence
  Synthetic
cccagcacuuugagaggcug

SEQ ID NO: 810517 - RNA, 20 nt, Artificial Sequence
  Synthetic
cccagcuacccaggaggcug

SEQ ID NO: 810518 - RNA, 20 nt, Artificial Sequence
  Synthetic
cccagauacucaggaggcug

SEQ ID NO: 810519 - RNA, 20 nt, Artificial Sequence
  Synthetic
cccaacuacucaggaggcug

SEQ ID NO: 810520 - RNA, 20 nt, Artificial Sequence
  Synthetic
cccagcuacucaggaggcug

SEQ ID NO: 810521 - RNA, 20 nt, Artificial Sequence
  Synthetic
cucagcuacucaggaggcug

SEQ ID NO: 810522 - RNA, 20 nt, Artificial Sequence
  Synthetic
ccuagcuacucaggaggcug

SEQ ID NO: 810523 - RNA, 20 nt, Artificial Sequence
  Synthetic
aguagcuacucaggaggcug

SEQ ID NO: 810524 - RNA, 20 nt, Artificial Sequence
  Synthetic
cuuagcuacucaggaggcug

SEQ ID NO: 810525 - RNA, 20 nt, Artificial Sequence
  Synthetic
cccaucuacucaggaggcug

SEQ ID NO: 810526 - RNA, 20 nt, Artificial Sequence
  Synthetic
cccagcuauucaggaggcug

SEQ ID NO: 810527 - RNA, 20 nt, Artificial Sequence
  Synthetic
aucuaggaaagaggaggcug

SEQ ID NO: 810528 - RNA, 20 nt, Artificial Sequence
  Synthetic
agcuacucgggaggaggcug

SEQ ID NO: 810529 - RNA, 20 nt, Artificial Sequence
  Synthetic
cccagcuacuuaggaggcug

SEQ ID NO: 810530 - RNA, 20 nt, Artificial Sequence
  Synthetic
cccagcacuuuaggaggcug

SEQ ID NO: 810531 - RNA, 20 nt, Artificial Sequence
  Synthetic
ucugcauguugcggaggcug

SEQ ID NO: 810532 - RNA, 20 nt, Artificial Sequence
  Synthetic
ucccagcuacucggaggcug

SEQ ID NO: 810533 - RNA, 20 nt, Artificial Sequence
  Synthetic
cccagguacuucggaggcug

SEQ ID NO: 810534 - RNA, 20 nt, Artificial Sequence
  Synthetic
ccccgcacuuucggaggcug

SEQ ID NO: 810535 - RNA, 20 nt, Artificial Sequence
  Synthetic
cccagcuacuagggaggcug

SEQ ID NO: 810536 - RNA, 20 nt, Artificial Sequence
  Synthetic
cccagcuacacgggaggcug

SEQ ID NO: 810537 - RNA, 20 nt, Artificial Sequence
  Synthetic
ucccagcuaccgggaggcug

SEQ ID NO: 810538 - RNA, 20 nt, Artificial Sequence
  Synthetic
cucagcuacccgggaggcug

SEQ ID NO: 810539 - RNA, 20 nt, Artificial Sequence
  Synthetic
accagcuacucgggaggcug

SEQ ID NO: 810540 - RNA, 20 nt, Artificial Sequence
  Synthetic
cccagcuacucgggaggcug

SEQ ID NO: 810541 - RNA, 20 nt, Artificial Sequence
  Synthetic
cucagcuacucgggaggcug

SEQ ID NO: 810542 - RNA, 20 nt, Artificial Sequence
  Synthetic
cccaguuacucgggaggcug

SEQ ID NO: 810543 - RNA, 20 nt, Artificial Sequence
  Synthetic
accagcugcucgggaggcug

SEQ ID NO: 810544 - RNA, 20 nt, Artificial Sequence
  Synthetic
cccagcuacgggggaggcug

SEQ ID NO: 810545 - RNA, 20 nt, Artificial Sequence
  Synthetic
cccagcacuaugggaggcug

SEQ ID NO: 810546 - RNA, 20 nt, Artificial Sequence
  Synthetic
cccagcuaccugggaggcug

SEQ ID NO: 810547 - RNA, 20 nt, Artificial Sequence
  Synthetic
cccagccacuugggaggcug

SEQ ID NO: 810548 - RNA, 20 nt, Artificial Sequence
  Synthetic
cacagcuacuugggaggcug

SEQ ID NO: 810549 - RNA, 20 nt, Artificial Sequence
  Synthetic
cccagcuacuugggaggcug

SEQ ID NO: 810550 - RNA, 20 nt, Artificial Sequence
  Synthetic
cucagcuacuugggaggcug

SEQ ID NO: 810551 - RNA, 20 nt, Artificial Sequence
  Synthetic
ccuagcuacuugggaggcug

SEQ ID NO: 810552 - RNA, 20 nt, Artificial Sequence
  Synthetic
cucugcuacuugggaggcug

SEQ ID NO: 810553 - RNA, 20 nt, Artificial Sequence
  Synthetic
cccagguacuugggaggcug

SEQ ID NO: 810554 - RNA, 20 nt, Artificial Sequence
  Synthetic
cccagcuauuugggaggcug

SEQ ID NO: 810555 - RNA, 20 nt, Artificial Sequence
  Synthetic
cccaacacuuugggaggcug

SEQ ID NO: 810556 - RNA, 20 nt, Artificial Sequence
  Synthetic
cccaccacuuugggaggcug

SEQ ID NO: 810557 - RNA, 20 nt, Artificial Sequence
  Synthetic
accagcacuuugggaggcug

SEQ ID NO: 810558 - RNA, 20 nt, Artificial Sequence
  Synthetic
cccagcacuuugggaggcug

SEQ ID NO: 810559 - RNA, 20 nt, Artificial Sequence
  Synthetic
ccuagcacuuugggaggcug

SEQ ID NO: 810560 - RNA, 20 nt, Artificial Sequence
  Synthetic
uuuagcacuuugggaggcug

SEQ ID NO: 810561 - RNA, 20 nt, Artificial Sequence
  Synthetic
ccccgcacuuugggaggcug

SEQ ID NO: 810562 - RNA, 20 nt, Artificial Sequence
  Synthetic
cccaguacuuugggaggcug

SEQ ID NO: 810563 - RNA, 20 nt, Artificial Sequence
  Synthetic
cccagcgcuuugggaggcug

SEQ ID NO: 810564 - RNA, 20 nt, Artificial Sequence
  Synthetic
cccagugcuuugggaggcug

SEQ ID NO: 810565 - RNA, 20 nt, Artificial Sequence
  Synthetic
cccugugcuuugggaggcug

SEQ ID NO: 810566 - RNA, 20 nt, Artificial Sequence
  Synthetic
cccuuuguuuugggaggcug

SEQ ID NO: 810567 - RNA, 20 nt, Artificial Sequence
  Synthetic
cccagacacacuggaggcug

SEQ ID NO: 810568 - RNA, 20 nt, Artificial Sequence
  Synthetic
cccagccacucuggaggcug

SEQ ID NO: 810569 - RNA, 20 nt, Artificial Sequence
  Synthetic
cccagcuacucuggaggcug

SEQ ID NO: 810570 - RNA, 20 nt, Artificial Sequence
  Synthetic
cucagcuacucuggaggcug

SEQ ID NO: 810571 - RNA, 20 nt, Artificial Sequence
  Synthetic
cccagcugcucuggaggcug

SEQ ID NO: 810572 - RNA, 20 nt, Artificial Sequence
  Synthetic
aaguaaguuucuggaggcug

SEQ ID NO: 810573 - RNA, 20 nt, Artificial Sequence
  Synthetic
auguucugaauaugaggcug

SEQ ID NO: 810574 - RNA, 20 nt, Artificial Sequence
  Synthetic
cccagcuacuccugaggcug

SEQ ID NO: 810575 - RNA, 20 nt, Artificial Sequence
  Synthetic
ucuucacguuaaguaggcug

SEQ ID NO: 810576 - RNA, 20 nt, Artificial Sequence
  Synthetic
cccagcuacucgguaggcug

SEQ ID NO: 810577 - RNA, 20 nt, Artificial Sequence
  Synthetic
uauuaccaccucaagggcug

SEQ ID NO: 810578 - RNA, 20 nt, Artificial Sequence
  Synthetic
ugugaaauagaugagggcug

SEQ ID NO: 810579 - RNA, 20 nt, Artificial Sequence
  Synthetic
cuggugguugccaggggcug

SEQ ID NO: 810580 - RNA, 20 nt, Artificial Sequence
  Synthetic
ucagugguuuccaggggcug

SEQ ID NO: 810581 - RNA, 20 nt, Artificial Sequence
  Synthetic
auggugguuuccaggggcug

SEQ ID NO: 810582 - RNA, 20 nt, Artificial Sequence
  Synthetic
aacggucaguuuaggggcug

SEQ ID NO: 810583 - RNA, 20 nt, Artificial Sequence
  Synthetic
accagcuacucagggggcug

SEQ ID NO: 810584 - RNA, 20 nt, Artificial Sequence
  Synthetic
aucccaacacuggggggcug

SEQ ID NO: 810585 - RNA, 20 nt, Artificial Sequence
  Synthetic
ugucgugggguggggggcug

SEQ ID NO: 810586 - RNA, 20 nt, Artificial Sequence
  Synthetic
uguuugucaguuuggggcug

SEQ ID NO: 810587 - RNA, 20 nt, Artificial Sequence
  Synthetic
caaaaccagaggcugggcug

SEQ ID NO: 810588 - RNA, 20 nt, Artificial Sequence
  Synthetic
ugaaauacugcugugggcug

SEQ ID NO: 810589 - RNA, 20 nt, Artificial Sequence
  Synthetic
uuuuuuaaaaucaauggcug

SEQ ID NO: 810590 - RNA, 20 nt, Artificial Sequence
  Synthetic
auucaguaugauaauggcug

SEQ ID NO: 810591 - RNA, 20 nt, Artificial Sequence
  Synthetic
cucacaguuccacauggcug

SEQ ID NO: 810592 - RNA, 20 nt, Artificial Sequence
  Synthetic
cacacaguucagcauggcug

SEQ ID NO: 810593 - RNA, 20 nt, Artificial Sequence
  Synthetic
cucacaguucagcauggcug

SEQ ID NO: 810594 - RNA, 20 nt, Artificial Sequence
  Synthetic
cucauaguucagcauggcug

SEQ ID NO: 810595 - RNA, 20 nt, Artificial Sequence
  Synthetic
uucaccauucugcauggcug

SEQ ID NO: 810596 - RNA, 20 nt, Artificial Sequence
  Synthetic
cucacugguuugcauggcug

SEQ ID NO: 810597 - RNA, 20 nt, Artificial Sequence
  Synthetic
ugaagauaaaaucauggcug

SEQ ID NO: 810598 - RNA, 20 nt, Artificial Sequence
  Synthetic
caucgcuagguucauggcug

SEQ ID NO: 810599 - RNA, 20 nt, Artificial Sequence
  Synthetic
cccagcuacucagauggcug

SEQ ID NO: 810600 - RNA, 20 nt, Artificial Sequence
  Synthetic
cucacaguucaauauggcug

SEQ ID NO: 810601 - RNA, 20 nt, Artificial Sequence
  Synthetic
cugcagcacaccacuggcug

SEQ ID NO: 810602 - RNA, 20 nt, Artificial Sequence
  Synthetic
auucaguaugauacuggcug

SEQ ID NO: 810603 - RNA, 20 nt, Artificial Sequence
  Synthetic
ucagaagauaacucuggcug

SEQ ID NO: 810604 - RNA, 20 nt, Artificial Sequence
  Synthetic
aucuaaauauuuucuggcug

SEQ ID NO: 810605 - RNA, 20 nt, Artificial Sequence
  Synthetic
aggcauuguguuaguggcug

SEQ ID NO: 810606 - RNA, 20 nt, Artificial Sequence
  Synthetic
uuuucuuuguucgguggcug

SEQ ID NO: 810607 - RNA, 20 nt, Artificial Sequence
  Synthetic
cucacaguucuguguggcug

SEQ ID NO: 810608 - RNA, 20 nt, Artificial Sequence
  Synthetic
cccuuuccccccauuggcug

SEQ ID NO: 810609 - RNA, 20 nt, Artificial Sequence
  Synthetic
uugacugcugggauuggcug

SEQ ID NO: 810610 - RNA, 20 nt, Artificial Sequence
  Synthetic
auucaguaugauauuggcug

SEQ ID NO: 810611 - RNA, 20 nt, Artificial Sequence
  Synthetic
aaucugaaggaacuuggcug

SEQ ID NO: 810612 - RNA, 20 nt, Artificial Sequence
  Synthetic
cuuacgguuccacuuggcug

SEQ ID NO: 810613 - RNA, 20 nt, Artificial Sequence
  Synthetic
agguggcuuccuuuuggcug

SEQ ID NO: 810614 - RNA, 20 nt, Artificial Sequence
  Synthetic
cauucuguagcaaaaugcug

SEQ ID NO: 810615 - RNA, 20 nt, Artificial Sequence
  Synthetic
cuuauuucuaguaaaugcug

SEQ ID NO: 810616 - RNA, 20 nt, Artificial Sequence
  Synthetic
aauuuuaaucaacaaugcug

SEQ ID NO: 810617 - RNA, 20 nt, Artificial Sequence
  Synthetic
cuuugguacuuggaaugcug

SEQ ID NO: 810618 - RNA, 20 nt, Artificial Sequence
  Synthetic
aauggcacaaaauaaugcug

SEQ ID NO: 810619 - RNA, 20 nt, Artificial Sequence
  Synthetic
aucugccauucuucaugcug

SEQ ID NO: 810620 - RNA, 20 nt, Artificial Sequence
  Synthetic
caucuaaguaaaagaugcug

SEQ ID NO: 810621 - RNA, 20 nt, Artificial Sequence
  Synthetic
ugacuguguucuagaugcug

SEQ ID NO: 810622 - RNA, 20 nt, Artificial Sequence
  Synthetic
uaccuaugugggcgaugcug

SEQ ID NO: 810623 - RNA, 20 nt, Artificial Sequence
  Synthetic
cacaggucauuaggaugcug

SEQ ID NO: 810624 - RNA, 20 nt, Artificial Sequence
  Synthetic
cccagcacuuucggaugcug

SEQ ID NO: 810625 - RNA, 20 nt, Artificial Sequence
  Synthetic
cucagcacuuugggaugcug

SEQ ID NO: 810626 - RNA, 20 nt, Artificial Sequence
  Synthetic
agccaggaauuuggaugcug

SEQ ID NO: 810627 - RNA, 20 nt, Artificial Sequence
  Synthetic
cuuaaaggaaaaauaugcug

SEQ ID NO: 810628 - RNA, 20 nt, Artificial Sequence
  Synthetic
aggcacugccaaauaugcug

SEQ ID NO: 810629 - RNA, 20 nt, Artificial Sequence
  Synthetic
agaugaguuggaauaugcug

SEQ ID NO: 810630 - RNA, 20 nt, Artificial Sequence
  Synthetic
ccagccaauguuuuaugcug

SEQ ID NO: 810631 - RNA, 20 nt, Artificial Sequence
  Synthetic
ccaccccgcucaaacugcug

SEQ ID NO: 810632 - RNA, 20 nt, Artificial Sequence
  Synthetic
aggauuagaaaagacugcug

SEQ ID NO: 810633 - RNA, 20 nt, Artificial Sequence
  Synthetic
ucacacucuggggacugcug

SEQ ID NO: 810634 - RNA, 20 nt, Artificial Sequence
  Synthetic
uuguaagugaaauacugcug

SEQ ID NO: 810635 - RNA, 20 nt, Artificial Sequence
  Synthetic
acauucacguauuacugcug

SEQ ID NO: 810636 - RNA, 20 nt, Artificial Sequence
  Synthetic
augaaauuuuauuacugcug

SEQ ID NO: 810637 - RNA, 20 nt, Artificial Sequence
  Synthetic
ucacacacuggggccugcug

SEQ ID NO: 810638 - RNA, 20 nt, Artificial Sequence
  Synthetic
uugugcagcuacuccugcug

SEQ ID NO: 810639 - RNA, 20 nt, Artificial Sequence
  Synthetic
uaaguccagacaagcugcug

SEQ ID NO: 810640 - RNA, 20 nt, Artificial Sequence
  Synthetic
auuucuuccauaggcugcug

SEQ ID NO: 810641 - RNA, 20 nt, Artificial Sequence
  Synthetic
uucuagaaccuucucugcug

SEQ ID NO: 810642 - RNA, 20 nt, Artificial Sequence
  Synthetic
aauaauauaacagucugcug

SEQ ID NO: 810643 - RNA, 20 nt, Artificial Sequence
  Synthetic
uauuugaaaagagucugcug

SEQ ID NO: 810644 - RNA, 20 nt, Artificial Sequence
  Synthetic
cucggccucccaaagugcug

SEQ ID NO: 810645 - RNA, 20 nt, Artificial Sequence
  Synthetic
uggaaagugaagaagugcug

SEQ ID NO: 810646 - RNA, 20 nt, Artificial Sequence
  Synthetic
uagauagugguuaagugcug

SEQ ID NO: 810647 - RNA, 20 nt, Artificial Sequence
  Synthetic
uuuccaaggaaacagugcug

SEQ ID NO: 810648 - RNA, 20 nt, Artificial Sequence
  Synthetic
uggucauauugccagugcug

SEQ ID NO: 810649 - RNA, 20 nt, Artificial Sequence
  Synthetic
ccacagcaaaagcagugcug

SEQ ID NO: 810650 - RNA, 20 nt, Artificial Sequence
  Synthetic
aagcuaguugagcagugcug

SEQ ID NO: 810651 - RNA, 20 nt, Artificial Sequence
  Synthetic
ucaccuaggcuuuagugcug

SEQ ID NO: 810652 - RNA, 20 nt, Artificial Sequence
  Synthetic
ucaggaaacaucaggugcug

SEQ ID NO: 810653 - RNA, 20 nt, Artificial Sequence
  Synthetic
agaggaugaagagggugcug

SEQ ID NO: 810654 - RNA, 20 nt, Artificial Sequence
  Synthetic
auucagaagagauggugcug

SEQ ID NO: 810655 - RNA, 20 nt, Artificial Sequence
  Synthetic
ccaggaaugugcuggugcug

SEQ ID NO: 810656 - RNA, 20 nt, Artificial Sequence
  Synthetic
uucauaaagugguggugcug

SEQ ID NO: 810657 - RNA, 20 nt, Artificial Sequence
  Synthetic
acggggaugguucugugcug

SEQ ID NO: 810658 - RNA, 20 nt, Artificial Sequence
  Synthetic
agauggaggcgauugugcug

SEQ ID NO: 810659 - RNA, 20 nt, Artificial Sequence
  Synthetic
auugguccaaauaauugcug

SEQ ID NO: 810660 - RNA, 20 nt, Artificial Sequence
  Synthetic
auguaagauuuucauugcug

SEQ ID NO: 810661 - RNA, 20 nt, Artificial Sequence
  Synthetic
agcaauacauacuauugcug

SEQ ID NO: 810662 - RNA, 20 nt, Artificial Sequence
  Synthetic
ucuuuuagcugcuauugcug

SEQ ID NO: 810663 - RNA, 20 nt, Artificial Sequence
  Synthetic
ugcagaaacaggccuugcug

SEQ ID NO: 810664 - RNA, 20 nt, Artificial Sequence
  Synthetic
ugaagcuuuuaaucuugcug

SEQ ID NO: 810665 - RNA, 20 nt, Artificial Sequence
  Synthetic
cuugcagugaaguguugcug

SEQ ID NO: 810666 - RNA, 20 nt, Artificial Sequence
  Synthetic
uuugagugagaguguugcug

SEQ ID NO: 810667 - RNA, 20 nt, Artificial Sequence
  Synthetic
ugucuauacauaauuugcug

SEQ ID NO: 810668 - RNA, 20 nt, Artificial Sequence
  Synthetic
cuguucuuuuacauuugcug

SEQ ID NO: 810669 - RNA, 20 nt, Artificial Sequence
  Synthetic
cuguuuuuuugcauuugcug

SEQ ID NO: 810670 - RNA, 20 nt, Artificial Sequence
  Synthetic
uauuauauagauauuugcug

SEQ ID NO: 810671 - RNA, 20 nt, Artificial Sequence
  Synthetic
aauuccaugggccuuugcug

SEQ ID NO: 810672 - RNA, 20 nt, Artificial Sequence
  Synthetic
uauuucuaaguucuuugcug

SEQ ID NO: 810673 - RNA, 20 nt, Artificial Sequence
  Synthetic
auuccuguguuaguuugcug

SEQ ID NO: 810674 - RNA, 20 nt, Artificial Sequence
  Synthetic
uuauugguugagguuugcug

SEQ ID NO: 810675 - RNA, 20 nt, Artificial Sequence
  Synthetic
auguuaaaagugguuugcug

SEQ ID NO: 810676 - RNA, 20 nt, Artificial Sequence
  Synthetic
uaccuugacaaauuuugcug

SEQ ID NO: 810677 - RNA, 20 nt, Artificial Sequence
  Synthetic
uuacauuuacaauuuugcug

SEQ ID NO: 810678 - RNA, 20 nt, Artificial Sequence
  Synthetic
ugagaagauccauuuugcug

SEQ ID NO: 810679 - RNA, 20 nt, Artificial Sequence
  Synthetic
ccccagcacugcuuuugcug

SEQ ID NO: 810680 - RNA, 20 nt, Artificial Sequence
  Synthetic
auuauacuaaaguuuugcug

SEQ ID NO: 810681 - RNA, 20 nt, Artificial Sequence
  Synthetic
agggucucacuuuuuugcug

SEQ ID NO: 810682 - RNA, 20 nt, Artificial Sequence
  Synthetic
acagcacacacaaaaaucug

SEQ ID NO: 810683 - RNA, 20 nt, Artificial Sequence
  Synthetic
uuagugcccucaaaaaucug

SEQ ID NO: 810684 - RNA, 20 nt, Artificial Sequence
  Synthetic
aaugcggaagagaaaaucug

SEQ ID NO: 810685 - RNA, 20 nt, Artificial Sequence
  Synthetic
aaacaacaguggcaaaucug

SEQ ID NO: 810686 - RNA, 20 nt, Artificial Sequence
  Synthetic
cuuuuaaaaaaucaaaucug

SEQ ID NO: 810687 - RNA, 20 nt, Artificial Sequence
  Synthetic
cuccaggucuuagaaaucug

SEQ ID NO: 810688 - RNA, 20 nt, Artificial Sequence
  Synthetic
uuuuagacuuaguaaaucug

SEQ ID NO: 810689 - RNA, 20 nt, Artificial Sequence
  Synthetic
ugaaaugugauaacaaucug

SEQ ID NO: 810690 - RNA, 20 nt, Artificial Sequence
  Synthetic
aaaagaagcccuacaaucug

SEQ ID NO: 810691 - RNA, 20 nt, Artificial Sequence
  Synthetic
aaauaucuucucccaaucug

SEQ ID NO: 810692 - RNA, 20 nt, Artificial Sequence
  Synthetic
aaggcuaaccuagcaaucug

SEQ ID NO: 810693 - RNA, 20 nt, Artificial Sequence
  Synthetic
aaggcuagccuagcaaucug

SEQ ID NO: 810694 - RNA, 20 nt, Artificial Sequence
  Synthetic
uguuagacacacagaaucug

SEQ ID NO: 810695 - RNA, 20 nt, Artificial Sequence
  Synthetic
agagagagagagagaaucug

SEQ ID NO: 810696 - RNA, 20 nt, Artificial Sequence
  Synthetic
agaugcaagaggagaaucug

SEQ ID NO: 810697 - RNA, 20 nt, Artificial Sequence
  Synthetic
acaugaaaggaaugaaucug

SEQ ID NO: 810698 - RNA, 20 nt, Artificial Sequence
  Synthetic
aaguaacccagaugaaucug

SEQ ID NO: 810699 - RNA, 20 nt, Artificial Sequence
  Synthetic
aaggaaauugagugaaucug

SEQ ID NO: 810700 - RNA, 20 nt, Artificial Sequence
  Synthetic
aaaaguaacaauauaaucug

SEQ ID NO: 810701 - RNA, 20 nt, Artificial Sequence
  Synthetic
uugaguagauuacuaaucug

SEQ ID NO: 810702 - RNA, 20 nt, Artificial Sequence
  Synthetic
acaacacauguuuuaaucug

SEQ ID NO: 810703 - RNA, 20 nt, Artificial Sequence
  Synthetic
uucuaggcaaugaacaucug

SEQ ID NO: 810704 - RNA, 20 nt, Artificial Sequence
  Synthetic
cuaaaugccugacacaucug

SEQ ID NO: 810705 - RNA, 20 nt, Artificial Sequence
  Synthetic
cucucaaaaaaccacaucug

SEQ ID NO: 810706 - RNA, 20 nt, Artificial Sequence
  Synthetic
cucaaaaagagagacaucug

SEQ ID NO: 810707 - RNA, 20 nt, Artificial Sequence
  Synthetic
uaucucuauauuuacaucug

SEQ ID NO: 810708 - RNA, 20 nt, Artificial Sequence
  Synthetic
uacaucauuaccaccaucug

SEQ ID NO: 810709 - RNA, 20 nt, Artificial Sequence
  Synthetic
cauuuguaaaugcccaucug

SEQ ID NO: 810710 - RNA, 20 nt, Artificial Sequence
  Synthetic
cagcuagauggucccaucug

SEQ ID NO: 810711 - RNA, 20 nt, Artificial Sequence
  Synthetic
aauuccccuggaaucaucug

SEQ ID NO: 810712 - RNA, 20 nt, Artificial Sequence
  Synthetic
agaaaguggugaaucaucug

SEQ ID NO: 810713 - RNA, 20 nt, Artificial Sequence
  Synthetic
caagaugggcagaucaucug

SEQ ID NO: 810714 - RNA, 20 nt, Artificial Sequence
  Synthetic
ugagguggauggaucaucug

SEQ ID NO: 810715 - RNA, 20 nt, Artificial Sequence
  Synthetic
cuaagguguuuucucaucug

SEQ ID NO: 810716 - RNA, 20 nt, Artificial Sequence
  Synthetic
uaaacuuccucugucaucug

SEQ ID NO: 810717 - RNA, 20 nt, Artificial Sequence
  Synthetic
ugaaaauuugacuucaucug

SEQ ID NO: 810718 - RNA, 20 nt, Artificial Sequence
  Synthetic
aucuaaugccugaagaucug

SEQ ID NO: 810719 - RNA, 20 nt, Artificial Sequence
  Synthetic
agggcuugaucacagaucug

SEQ ID NO: 810720 - RNA, 20 nt, Artificial Sequence
  Synthetic
ucucuagacaggcagaucug

SEQ ID NO: 810721 - RNA, 20 nt, Artificial Sequence
  Synthetic
uuacuaggccugcagaucug

SEQ ID NO: 810722 - RNA, 20 nt, Artificial Sequence
  Synthetic
uccccuggccuagagaucug

SEQ ID NO: 810723 - RNA, 20 nt, Artificial Sequence
  Synthetic
agugcugaggguaggaucug

SEQ ID NO: 810724 - RNA, 20 nt, Artificial Sequence
  Synthetic
auccuauugaaaaugaucug

SEQ ID NO: 810725 - RNA, 20 nt, Artificial Sequence
  Synthetic
auguacuucacaaauaucug

SEQ ID NO: 810726 - RNA, 20 nt, Artificial Sequence
  Synthetic
ucugacuaacccaauaucug

SEQ ID NO: 810727 - RNA, 20 nt, Artificial Sequence
  Synthetic
accuuuagaguuaauaucug

SEQ ID NO: 810728 - RNA, 20 nt, Artificial Sequence
  Synthetic
caauaaaaaccacauaucug

SEQ ID NO: 810729 - RNA, 20 nt, Artificial Sequence
  Synthetic
cauuuugcaguucauaucug

SEQ ID NO: 810730 - RNA, 20 nt, Artificial Sequence
  Synthetic
aaugaaaacuaagauaucug

SEQ ID NO: 810731 - RNA, 20 nt, Artificial Sequence
  Synthetic
auacagaguugaacuaucug

SEQ ID NO: 810732 - RNA, 20 nt, Artificial Sequence
  Synthetic
caagcuccccaggcuaucug

SEQ ID NO: 810733 - RNA, 20 nt, Artificial Sequence
  Synthetic
augaaaggaggugcuaucug

SEQ ID NO: 810734 - RNA, 20 nt, Artificial Sequence
  Synthetic
uguguuuauuacucuaucug

SEQ ID NO: 810735 - RNA, 20 nt, Artificial Sequence
  Synthetic
uguucucauaugucuaucug

SEQ ID NO: 810736 - RNA, 20 nt, Artificial Sequence
  Synthetic
ugcuucuaaauauguaucug

SEQ ID NO: 810737 - RNA, 20 nt, Artificial Sequence
  Synthetic
agaaugcagaaguguaucug

SEQ ID NO: 810738 - RNA, 20 nt, Artificial Sequence
  Synthetic
caaauuucagcccuuaucug

SEQ ID NO: 810739 - RNA, 20 nt, Artificial Sequence
  Synthetic
auuuugauuguucuuaucug

SEQ ID NO: 810740 - RNA, 20 nt, Artificial Sequence
  Synthetic
cuuacauuuuuaguuaucug

SEQ ID NO: 810741 - RNA, 20 nt, Artificial Sequence
  Synthetic
ucauauuagagcuuuaucug

SEQ ID NO: 810742 - RNA, 20 nt, Artificial Sequence
  Synthetic
caacugacacagaaacucug

SEQ ID NO: 810743 - RNA, 20 nt, Artificial Sequence
  Synthetic
cuaguaaaucagaaacucug

SEQ ID NO: 810744 - RNA, 20 nt, Artificial Sequence
  Synthetic
uccuagcaaaaccaacucug

SEQ ID NO: 810745 - RNA, 20 nt, Artificial Sequence
  Synthetic
aucccaaaucugcaacucug

SEQ ID NO: 810746 - RNA, 20 nt, Artificial Sequence
  Synthetic
aaccacuucacucaacucug

SEQ ID NO: 810747 - RNA, 20 nt, Artificial Sequence
  Synthetic
auuuugaaucaggaacucug

SEQ ID NO: 810748 - RNA, 20 nt, Artificial Sequence
  Synthetic
cucccaagcccugaacucug

SEQ ID NO: 810749 - RNA, 20 nt, Artificial Sequence
  Synthetic
ucacugagccuugaacucug

SEQ ID NO: 810750 - RNA, 20 nt, Artificial Sequence
  Synthetic
ugcuaggggaaauaacucug

SEQ ID NO: 810751 - RNA, 20 nt, Artificial Sequence
  Synthetic
aaggggaacaucacacucug

SEQ ID NO: 810752 - RNA, 20 nt, Artificial Sequence
  Synthetic
aaugggaacaucacacucug

SEQ ID NO: 810753 - RNA, 20 nt, Artificial Sequence
  Synthetic
aaggggaauaucacacucug

SEQ ID NO: 810754 - RNA, 20 nt, Artificial Sequence
  Synthetic
uggcaaaccuggccacucug

SEQ ID NO: 810755 - RNA, 20 nt, Artificial Sequence
  Synthetic
ccaaagcaguuuccacucug

SEQ ID NO: 810756 - RNA, 20 nt, Artificial Sequence
  Synthetic
cacuugcuggcugcacucug

SEQ ID NO: 810757 - RNA, 20 nt, Artificial Sequence
  Synthetic
uugccaaaauccucacucug

SEQ ID NO: 810758 - RNA, 20 nt, Artificial Sequence
  Synthetic
ugggacuauuagucacucug

SEQ ID NO: 810759 - RNA, 20 nt, Artificial Sequence
  Synthetic
caagagccauuuucacucug

SEQ ID NO: 810760 - RNA, 20 nt, Artificial Sequence
  Synthetic
ccuacucauuuuucacucug

SEQ ID NO: 810761 - RNA, 20 nt, Artificial Sequence
  Synthetic
cuacugaaucagagacucug

SEQ ID NO: 810762 - RNA, 20 nt, Artificial Sequence
  Synthetic
aaagcuaucugacuacucug

SEQ ID NO: 810763 - RNA, 20 nt, Artificial Sequence
  Synthetic
aaauaauuuauccuacucug

SEQ ID NO: 810764 - RNA, 20 nt, Artificial Sequence
  Synthetic
aaacacuuccaucuacucug

SEQ ID NO: 810765 - RNA, 20 nt, Artificial Sequence
  Synthetic
cuuuuaacccuucuacucug

SEQ ID NO: 810766 - RNA, 20 nt, Artificial Sequence
  Synthetic
uaguuuacagugguacucug

SEQ ID NO: 810767 - RNA, 20 nt, Artificial Sequence
  Synthetic
ugacagauuccuguacucug

SEQ ID NO: 810768 - RNA, 20 nt, Artificial Sequence
  Synthetic
caauaauuuuaucaccucug

SEQ ID NO: 810769 - RNA, 20 nt, Artificial Sequence
  Synthetic
aacgaagccacggaccucug

SEQ ID NO: 810770 - RNA, 20 nt, Artificial Sequence
  Synthetic
caccuguaaaucuaccucug

SEQ ID NO: 810771 - RNA, 20 nt, Artificial Sequence
  Synthetic
ucauugccucccacccucug

SEQ ID NO: 810772 - RNA, 20 nt, Artificial Sequence
  Synthetic
ccgugcuucugcgcccucug

SEQ ID NO: 810773 - RNA, 20 nt, Artificial Sequence
  Synthetic
aaauaguauugcagccucug

SEQ ID NO: 810774 - RNA, 20 nt, Artificial Sequence
  Synthetic
caguuagauaaaggccucug

SEQ ID NO: 810775 - RNA, 20 nt, Artificial Sequence
  Synthetic
aucucucccuuuggccucug

SEQ ID NO: 810776 - RNA, 20 nt, Artificial Sequence
  Synthetic
ccuacagcaugaauccucug

SEQ ID NO: 810777 - RNA, 20 nt, Artificial Sequence
  Synthetic
uauauaugaaaccuccucug

SEQ ID NO: 810778 - RNA, 20 nt, Artificial Sequence
  Synthetic
ugauggacaugaguccucug

SEQ ID NO: 810779 - RNA, 20 nt, Artificial Sequence
  Synthetic
auagccuuguaauagcucug

SEQ ID NO: 810780 - RNA, 20 nt, Artificial Sequence
  Synthetic
uuucugauuuacuagcucug

SEQ ID NO: 810781 - RNA, 20 nt, Artificial Sequence
  Synthetic
uuuuaagaagaaaggcucug

SEQ ID NO: 810782 - RNA, 20 nt, Artificial Sequence
  Synthetic
uuaucccucugaaggcucug

SEQ ID NO: 810783 - RNA, 20 nt, Artificial Sequence
  Synthetic
acgguuagguucaggcucug

SEQ ID NO: 810784 - RNA, 20 nt, Artificial Sequence
  Synthetic
ugagacauuaugaggcucug

SEQ ID NO: 810785 - RNA, 20 nt, Artificial Sequence
  Synthetic
uucaucuugguuaggcucug

SEQ ID NO: 810786 - RNA, 20 nt, Artificial Sequence
  Synthetic
aaauucaaaugauggcucug

SEQ ID NO: 810787 - RNA, 20 nt, Artificial Sequence
  Synthetic
aaugguuacuuuuggcucug

SEQ ID NO: 810788 - RNA, 20 nt, Artificial Sequence
  Synthetic
acugucaugcuaaugcucug

SEQ ID NO: 810789 - RNA, 20 nt, Artificial Sequence
  Synthetic
augcuguuggggaugcucug

SEQ ID NO: 810790 - RNA, 20 nt, Artificial Sequence
  Synthetic
uuguucuuguugaugcucug

SEQ ID NO: 810791 - RNA, 20 nt, Artificial Sequence
  Synthetic
ucaccauauuaacugcucug

SEQ ID NO: 810792 - RNA, 20 nt, Artificial Sequence
  Synthetic
uugucuuugaugcugcucug

SEQ ID NO: 810793 - RNA, 20 nt, Artificial Sequence
  Synthetic
caagugguacugcugcucug

SEQ ID NO: 810794 - RNA, 20 nt, Artificial Sequence
  Synthetic
uuuagaugaaaauugcucug

SEQ ID NO: 810795 - RNA, 20 nt, Artificial Sequence
  Synthetic
auagaccucucuuugcucug

SEQ ID NO: 810796 - RNA, 20 nt, Artificial Sequence
  Synthetic
caacuaaaucagaaucucug

SEQ ID NO: 810797 - RNA, 20 nt, Artificial Sequence
  Synthetic
cugcuaaaucagaaucucug

SEQ ID NO: 810798 - RNA, 20 nt, Artificial Sequence
  Synthetic
auuucugaggagaaucucug

SEQ ID NO: 810799 - RNA, 20 nt, Artificial Sequence
  Synthetic
cagccaaggaagcaucucug

SEQ ID NO: 810800 - RNA, 20 nt, Artificial Sequence
  Synthetic
cuacugaaucagcaucucug

SEQ ID NO: 810801 - RNA, 20 nt, Artificial Sequence
  Synthetic
auguaaaggaaagaucucug

SEQ ID NO: 810802 - RNA, 20 nt, Artificial Sequence
  Synthetic
ugguuuuucagugaucucug

SEQ ID NO: 810803 - RNA, 20 nt, Artificial Sequence
  Synthetic
uagcaguaucccacucucug

SEQ ID NO: 810804 - RNA, 20 nt, Artificial Sequence
  Synthetic
ucucucucucucacucucug

SEQ ID NO: 810805 - RNA, 20 nt, Artificial Sequence
  Synthetic
uuaaacugacauacucucug

SEQ ID NO: 810806 - RNA, 20 nt, Artificial Sequence
  Synthetic
uccaacuucuugccucucug

SEQ ID NO: 810807 - RNA, 20 nt, Artificial Sequence
  Synthetic
cuccaugugacagcucucug

SEQ ID NO: 810808 - RNA, 20 nt, Artificial Sequence
  Synthetic
aggagcuagcuagcucucug

SEQ ID NO: 810809 - RNA, 20 nt, Artificial Sequence
  Synthetic
uaaucaggagcugcucucug

SEQ ID NO: 810810 - RNA, 20 nt, Artificial Sequence
  Synthetic
cuagcugugucaucucucug

SEQ ID NO: 810811 - RNA, 20 nt, Artificial Sequence
  Synthetic
ucuuaucuugggucucucug

SEQ ID NO: 810812 - RNA, 20 nt, Artificial Sequence
  Synthetic
aacguuguugugucucucug

SEQ ID NO: 810813 - RNA, 20 nt, Artificial Sequence
  Synthetic
ccuaguagagguucucucug

SEQ ID NO: 810814 - RNA, 20 nt, Artificial Sequence
  Synthetic
ucaaauuuuuaacgucucug

SEQ ID NO: 810815 - RNA, 20 nt, Artificial Sequence
  Synthetic
cuuccucugucccgucucug

SEQ ID NO: 810816 - RNA, 20 nt, Artificial Sequence
  Synthetic
uuucagugguagggucucug

SEQ ID NO: 810817 - RNA, 20 nt, Artificial Sequence
  Synthetic
uaagcauccccuugucucug

SEQ ID NO: 810818 - RNA, 20 nt, Artificial Sequence
  Synthetic
agacaauuaaaaauucucug

SEQ ID NO: 810819 - RNA, 20 nt, Artificial Sequence
  Synthetic
aagcgaggcugaauucucug

SEQ ID NO: 810820 - RNA, 20 nt, Artificial Sequence
  Synthetic
auucauuuuuacauucucug

SEQ ID NO: 810821 - RNA, 20 nt, Artificial Sequence
  Synthetic
ugugaaucuuccauucucug

SEQ ID NO: 810822 - RNA, 20 nt, Artificial Sequence
  Synthetic
aacacaaaagaucuucucug

SEQ ID NO: 810823 - RNA, 20 nt, Artificial Sequence
  Synthetic
ucauucugaaagguucucug

SEQ ID NO: 810824 - RNA, 20 nt, Artificial Sequence
  Synthetic
auacugucaaauguucucug

SEQ ID NO: 810825 - RNA, 20 nt, Artificial Sequence
  Synthetic
ccucugucuccuguucucug

SEQ ID NO: 810826 - RNA, 20 nt, Artificial Sequence
  Synthetic
aaacauuuauaauuucucug

SEQ ID NO: 810827 - RNA, 20 nt, Artificial Sequence
  Synthetic
caacaucgagccuuucucug

SEQ ID NO: 810828 - RNA, 20 nt, Artificial Sequence
  Synthetic
auacuuuccuguuuucucug

SEQ ID NO: 810829 - RNA, 20 nt, Artificial Sequence
  Synthetic
cuccaagaggcaacagucug

SEQ ID NO: 810830 - RNA, 20 nt, Artificial Sequence
  Synthetic
uuauaauugcacacagucug

SEQ ID NO: 810831 - RNA, 20 nt, Artificial Sequence
  Synthetic
auuauaaauuacccagucug

SEQ ID NO: 810832 - RNA, 20 nt, Artificial Sequence
  Synthetic
ccuagcuacuuggcagucug

SEQ ID NO: 810833 - RNA, 20 nt, Artificial Sequence
  Synthetic
ucauggaguuacagagucug

SEQ ID NO: 810834 - RNA, 20 nt, Artificial Sequence
  Synthetic
caccaugaagagagagucug

SEQ ID NO: 810835 - RNA, 20 nt, Artificial Sequence
  Synthetic
cccagcuacaugggagucug

SEQ ID NO: 810836 - RNA, 20 nt, Artificial Sequence
  Synthetic
cccagcacuuugggagucug

SEQ ID NO: 810837 - RNA, 20 nt, Artificial Sequence
  Synthetic
uuuugugcuaccugagucug

SEQ ID NO: 810838 - RNA, 20 nt, Artificial Sequence
  Synthetic
uuuguuugcuccugagucug

SEQ ID NO: 810839 - RNA, 20 nt, Artificial Sequence
  Synthetic
cugucuaccagcugagucug

SEQ ID NO: 810840 - RNA, 20 nt, Artificial Sequence
  Synthetic
cauuauuucauaguagucug

SEQ ID NO: 810841 - RNA, 20 nt, Artificial Sequence
  Synthetic
ugaauaccugccaccgucug

SEQ ID NO: 810842 - RNA, 20 nt, Artificial Sequence
  Synthetic
ucccccuccccccaggucug

SEQ ID NO: 810843 - RNA, 20 nt, Artificial Sequence
  Synthetic
auucugauuuagcaggucug

SEQ ID NO: 810844 - RNA, 20 nt, Artificial Sequence
  Synthetic
aucuauucccaagaggucug

SEQ ID NO: 810845 - RNA, 20 nt, Artificial Sequence
  Synthetic
cuucuaauuggggaggucug

SEQ ID NO: 810846 - RNA, 20 nt, Artificial Sequence
  Synthetic
augcugauucaguaggucug

SEQ ID NO: 810847 - RNA, 20 nt, Artificial Sequence
  Synthetic
aacggauugguacgggucug

SEQ ID NO: 810848 - RNA, 20 nt, Artificial Sequence
  Synthetic
aggaauaaaaguggggucug

SEQ ID NO: 810849 - RNA, 20 nt, Artificial Sequence
  Synthetic
cacugaccuguacuggucug

SEQ ID NO: 810850 - RNA, 20 nt, Artificial Sequence
  Synthetic
uuucauuaacuucuggucug

SEQ ID NO: 810851 - RNA, 20 nt, Artificial Sequence
  Synthetic
aaacuguuauuucuggucug

SEQ ID NO: 810852 - RNA, 20 nt, Artificial Sequence
  Synthetic
auuuccuuaaauguggucug

SEQ ID NO: 810853 - RNA, 20 nt, Artificial Sequence
  Synthetic
uuccugauucaaaaugucug

SEQ ID NO: 810854 - RNA, 20 nt, Artificial Sequence
  Synthetic
ugcuaauguuaaaaugucug

SEQ ID NO: 810855 - RNA, 20 nt, Artificial Sequence
  Synthetic
caauguaucacaaaugucug

SEQ ID NO: 810856 - RNA, 20 nt, Artificial Sequence
  Synthetic
ccaaaaagaaagaaugucug

SEQ ID NO: 810857 - RNA, 20 nt, Artificial Sequence
  Synthetic
ugaaaaaauagccaugucug

SEQ ID NO: 810858 - RNA, 20 nt, Artificial Sequence
  Synthetic
aacacaauguaucaugucug

SEQ ID NO: 810859 - RNA, 20 nt, Artificial Sequence
  Synthetic
uuucaguuauaagaugucug

SEQ ID NO: 810860 - RNA, 20 nt, Artificial Sequence
  Synthetic
augguccccaaauaugucug

SEQ ID NO: 810861 - RNA, 20 nt, Artificial Sequence
  Synthetic
aaguagcacagcuaugucug

SEQ ID NO: 810862 - RNA, 20 nt, Artificial Sequence
  Synthetic
ccccacucacuguaugucug

SEQ ID NO: 810863 - RNA, 20 nt, Artificial Sequence
  Synthetic
aucaugauucuguaugucug

SEQ ID NO: 810864 - RNA, 20 nt, Artificial Sequence
  Synthetic
uucucuagagcaacugucug

SEQ ID NO: 810865 - RNA, 20 nt, Artificial Sequence
  Synthetic
auauccagagaugcugucug

SEQ ID NO: 810866 - RNA, 20 nt, Artificial Sequence
  Synthetic
cagucauccuucagugucug

SEQ ID NO: 810867 - RNA, 20 nt, Artificial Sequence
  Synthetic
aggcuagcauugagugucug

SEQ ID NO: 810868 - RNA, 20 nt, Artificial Sequence
  Synthetic
aagucauccuguggugucug

SEQ ID NO: 810869 - RNA, 20 nt, Artificial Sequence
  Synthetic
accagcagauuuggugucug

SEQ ID NO: 810870 - RNA, 20 nt, Artificial Sequence
  Synthetic
agcuaaaaguccauugucug

SEQ ID NO: 810871 - RNA, 20 nt, Artificial Sequence
  Synthetic
cuuuauuuagguauugucug

SEQ ID NO: 810872 - RNA, 20 nt, Artificial Sequence
  Synthetic
aauuuguugagacuugucug

SEQ ID NO: 810873 - RNA, 20 nt, Artificial Sequence
  Synthetic
uuguauuauuuacuugucug

SEQ ID NO: 810874 - RNA, 20 nt, Artificial Sequence
  Synthetic
uauaaaaguggucuugucug

SEQ ID NO: 810875 - RNA, 20 nt, Artificial Sequence
  Synthetic
uguuuuagcugauuugucug

SEQ ID NO: 810876 - RNA, 20 nt, Artificial Sequence
  Synthetic
aagagucaaggaaaauucug

SEQ ID NO: 810877 - RNA, 20 nt, Artificial Sequence
  Synthetic
cucauuucugccaaauucug

SEQ ID NO: 810878 - RNA, 20 nt, Artificial Sequence
  Synthetic
caaggaaauaauaaauucug

SEQ ID NO: 810879 - RNA, 20 nt, Artificial Sequence
  Synthetic
uuaucuucacaauaauucug

SEQ ID NO: 810880 - RNA, 20 nt, Artificial Sequence
  Synthetic
uuuuacucagcauaauucug

SEQ ID NO: 810881 - RNA, 20 nt, Artificial Sequence
  Synthetic
auuugaucagauuaauucug

SEQ ID NO: 810882 - RNA, 20 nt, Artificial Sequence
  Synthetic
uuaucauauuauuaauucug

SEQ ID NO: 810883 - RNA, 20 nt, Artificial Sequence
  Synthetic
uagcucccauuuuaauucug

SEQ ID NO: 810884 - RNA, 20 nt, Artificial Sequence
  Synthetic
auuuguaacaacacauucug

SEQ ID NO: 810885 - RNA, 20 nt, Artificial Sequence
  Synthetic
ccaaauagggucacauucug

SEQ ID NO: 810886 - RNA, 20 nt, Artificial Sequence
  Synthetic
aaauauuuuuacccauucug

SEQ ID NO: 810887 - RNA, 20 nt, Artificial Sequence
  Synthetic
cucucuuuauccucauucug

SEQ ID NO: 810888 - RNA, 20 nt, Artificial Sequence
  Synthetic
ucaaucaaauuaagauucug

SEQ ID NO: 810889 - RNA, 20 nt, Artificial Sequence
  Synthetic
cacaaaugaagccgauucug

SEQ ID NO: 810890 - RNA, 20 nt, Artificial Sequence
  Synthetic
uuuagguaggagggauucug

SEQ ID NO: 810891 - RNA, 20 nt, Artificial Sequence
  Synthetic
cugcugggaccuggauucug

SEQ ID NO: 810892 - RNA, 20 nt, Artificial Sequence
  Synthetic
caccucccaccaugauucug

SEQ ID NO: 810893 - RNA, 20 nt, Artificial Sequence
  Synthetic
aaguguucugaaauauucug

SEQ ID NO: 810894 - RNA, 20 nt, Artificial Sequence
  Synthetic
cuucuuuucaucauauucug

SEQ ID NO: 810895 - RNA, 20 nt, Artificial Sequence
  Synthetic
cagcauuucugacuauucug

SEQ ID NO: 810896 - RNA, 20 nt, Artificial Sequence
  Synthetic
aacacaaaagagcuauucug

SEQ ID NO: 810897 - RNA, 20 nt, Artificial Sequence
  Synthetic
ccaucagcuuuuguauucug

SEQ ID NO: 810898 - RNA, 20 nt, Artificial Sequence
  Synthetic
acugaguuuuaauuauucug

SEQ ID NO: 810899 - RNA, 20 nt, Artificial Sequence
  Synthetic
uuuaucugcuucuuauucug

SEQ ID NO: 810900 - RNA, 20 nt, Artificial Sequence
  Synthetic
agacuguuuuaguuauucug

SEQ ID NO: 810901 - RNA, 20 nt, Artificial Sequence
  Synthetic
acaacauagaaaaacuucug

SEQ ID NO: 810902 - RNA, 20 nt, Artificial Sequence
  Synthetic
agcuuccagcagaacuucug

SEQ ID NO: 810903 - RNA, 20 nt, Artificial Sequence
  Synthetic
aauagccuguauaacuucug

SEQ ID NO: 810904 - RNA, 20 nt, Artificial Sequence
  Synthetic
aaugucaaauaucacuucug

SEQ ID NO: 810905 - RNA, 20 nt, Artificial Sequence
  Synthetic
cucagcuaugccuacuucug

SEQ ID NO: 810906 - RNA, 20 nt, Artificial Sequence
  Synthetic
ucucuuaauuucuacuucug

SEQ ID NO: 810907 - RNA, 20 nt, Artificial Sequence
  Synthetic
ccaauaacagaguacuucug

SEQ ID NO: 810908 - RNA, 20 nt, Artificial Sequence
  Synthetic
uuaaaauguguuuacuucug

SEQ ID NO: 810909 - RNA, 20 nt, Artificial Sequence
  Synthetic
auguccuuauaccccuucug

SEQ ID NO: 810910 - RNA, 20 nt, Artificial Sequence
  Synthetic
ucuguccaauaucccuucug

SEQ ID NO: 810911 - RNA, 20 nt, Artificial Sequence
  Synthetic
ccuagggacauggccuucug

SEQ ID NO: 810912 - RNA, 20 nt, Artificial Sequence
  Synthetic
uugaauuuacacuccuucug

SEQ ID NO: 810913 - RNA, 20 nt, Artificial Sequence
  Synthetic
cauagcagcaucuccuucug

SEQ ID NO: 810914 - RNA, 20 nt, Artificial Sequence
  Synthetic
aggaggguugguuccuucug

SEQ ID NO: 810915 - RNA, 20 nt, Artificial Sequence
  Synthetic
caagaaucacuuuccuucug

SEQ ID NO: 810916 - RNA, 20 nt, Artificial Sequence
  Synthetic
cagcaucuacucagcuucug

SEQ ID NO: 810917 - RNA, 20 nt, Artificial Sequence
  Synthetic
aauugaaaauaaugcuucug

SEQ ID NO: 810918 - RNA, 20 nt, Artificial Sequence
  Synthetic
accucaggugguugcuucug

SEQ ID NO: 810919 - RNA, 20 nt, Artificial Sequence
  Synthetic
aaguugauauguaucuucug

SEQ ID NO: 810920 - RNA, 20 nt, Artificial Sequence
  Synthetic
uguucuagccugcucuucug

SEQ ID NO: 810921 - RNA, 20 nt, Artificial Sequence
  Synthetic
uguuuuuggaaauucuucug

SEQ ID NO: 810922 - RNA, 20 nt, Artificial Sequence
  Synthetic
cucaugcauugcuucuucug

SEQ ID NO: 810923 - RNA, 20 nt, Artificial Sequence
  Synthetic
uggucgaauucuuucuucug

SEQ ID NO: 810924 - RNA, 20 nt, Artificial Sequence
  Synthetic
uuuaauagcaguuucuucug

SEQ ID NO: 810925 - RNA, 20 nt, Artificial Sequence
  Synthetic
cauccuucuuguuucuucug

SEQ ID NO: 810926 - RNA, 20 nt, Artificial Sequence
  Synthetic
acucaugguguuuucuucug

SEQ ID NO: 810927 - RNA, 20 nt, Artificial Sequence
  Synthetic
agagaaaagugaaaguucug

SEQ ID NO: 810928 - RNA, 20 nt, Artificial Sequence
  Synthetic
uccccaagccuuaaguucug

SEQ ID NO: 810929 - RNA, 20 nt, Artificial Sequence
  Synthetic
caagagaaguugcaguucug

SEQ ID NO: 810930 - RNA, 20 nt, Artificial Sequence
  Synthetic
cagcauauucacagguucug

SEQ ID NO: 810931 - RNA, 20 nt, Artificial Sequence
  Synthetic
aauuaaugcagaauguucug

SEQ ID NO: 810932 - RNA, 20 nt, Artificial Sequence
  Synthetic
acuuccaugaauauguucug

SEQ ID NO: 810933 - RNA, 20 nt, Artificial Sequence
  Synthetic
uuuauuuuauugguguucug

SEQ ID NO: 810934 - RNA, 20 nt, Artificial Sequence
  Synthetic
uuaguguuugccaauuucug

SEQ ID NO: 810935 - RNA, 20 nt, Artificial Sequence
  Synthetic
cuacugaaucagaauuucug

SEQ ID NO: 810936 - RNA, 20 nt, Artificial Sequence
  Synthetic
cauuuuucuuuuaauuucug

SEQ ID NO: 810937 - RNA, 20 nt, Artificial Sequence
  Synthetic
aggaauuucaaucauuucug

SEQ ID NO: 810938 - RNA, 20 nt, Artificial Sequence
  Synthetic
ugacuuggaccucauuucug

SEQ ID NO: 810939 - RNA, 20 nt, Artificial Sequence
  Synthetic
aacauaaaacuucauuucug

SEQ ID NO: 810940 - RNA, 20 nt, Artificial Sequence
  Synthetic
uuuuugaaaauagauuucug

SEQ ID NO: 810941 - RNA, 20 nt, Artificial Sequence
  Synthetic
uguuacauaaaauauuucug

SEQ ID NO: 810942 - RNA, 20 nt, Artificial Sequence
  Synthetic
acuucucuccuauauuucug

SEQ ID NO: 810943 - RNA, 20 nt, Artificial Sequence
  Synthetic
aggaggagaaguuauuucug

SEQ ID NO: 810944 - RNA, 20 nt, Artificial Sequence
  Synthetic
ccugugacuccaacuuucug

SEQ ID NO: 810945 - RNA, 20 nt, Artificial Sequence
  Synthetic
ccugcuucucugccuuucug

SEQ ID NO: 810946 - RNA, 20 nt, Artificial Sequence
  Synthetic
uagcaugaaaaagcuuucug

SEQ ID NO: 810947 - RNA, 20 nt, Artificial Sequence
  Synthetic
agggggagaacugcuuucug

SEQ ID NO: 810948 - RNA, 20 nt, Artificial Sequence
  Synthetic
uuugaacccuagucuuucug

SEQ ID NO: 810949 - RNA, 20 nt, Artificial Sequence
  Synthetic
uggugcuuagugaguuucug

SEQ ID NO: 810950 - RNA, 20 nt, Artificial Sequence
  Synthetic
agcccuguuuuuaguuucug

SEQ ID NO: 810951 - RNA, 20 nt, Artificial Sequence
  Synthetic
aaaggccucugagguuucug

SEQ ID NO: 810952 - RNA, 20 nt, Artificial Sequence
  Synthetic
uagagauaaggauguuucug

SEQ ID NO: 810953 - RNA, 20 nt, Artificial Sequence
  Synthetic
cauagcaacaucuguuucug

SEQ ID NO: 810954 - RNA, 20 nt, Artificial Sequence
  Synthetic
aauaguaaccucuguuucug

SEQ ID NO: 810955 - RNA, 20 nt, Artificial Sequence
  Synthetic
uaggacuguguguguuucug

SEQ ID NO: 810956 - RNA, 20 nt, Artificial Sequence
  Synthetic
ugaaaaaacgccauuuucug

SEQ ID NO: 810957 - RNA, 20 nt, Artificial Sequence
  Synthetic
aaagaaaaacucauuuucug

SEQ ID NO: 810958 - RNA, 20 nt, Artificial Sequence
  Synthetic
ccuaauguauauauuuucug

SEQ ID NO: 810959 - RNA, 20 nt, Artificial Sequence
  Synthetic
aacacuguuggacuuuucug

SEQ ID NO: 810960 - RNA, 20 nt, Artificial Sequence
  Synthetic
cagaauuccuuccuuuucug

SEQ ID NO: 810961 - RNA, 20 nt, Artificial Sequence
  Synthetic
aauucuuugacauuuuucug

SEQ ID NO: 810962 - RNA, 20 nt, Artificial Sequence
  Synthetic
aacagaugacauuuuuucug

SEQ ID NO: 810963 - RNA, 20 nt, Artificial Sequence
  Synthetic
aauugaaaacaaaaaaagug

SEQ ID NO: 810964 - RNA, 20 nt, Artificial Sequence
  Synthetic
aacaaccccaucaaaaagug

SEQ ID NO: 810965 - RNA, 20 nt, Artificial Sequence
  Synthetic
aagccaagacaagaaaagug

SEQ ID NO: 810966 - RNA, 20 nt, Artificial Sequence
  Synthetic
aauuacaaggaauaaaagug

SEQ ID NO: 810967 - RNA, 20 nt, Artificial Sequence
  Synthetic
uaaccauauacauaaaagug

SEQ ID NO: 810968 - RNA, 20 nt, Artificial Sequence
  Synthetic
uguuacagaagcccaaagug

SEQ ID NO: 810969 - RNA, 20 nt, Artificial Sequence
  Synthetic
aaaugucucugcccaaagug

SEQ ID NO: 810970 - RNA, 20 nt, Artificial Sequence
  Synthetic
caccucagccucccaaagug

SEQ ID NO: 810971 - RNA, 20 nt, Artificial Sequence
  Synthetic
aaaaaccaaaacucaaagug

SEQ ID NO: 810972 - RNA, 20 nt, Artificial Sequence
  Synthetic
uuuucuugcuacucaaagug

SEQ ID NO: 810973 - RNA, 20 nt, Artificial Sequence
  Synthetic
uuuuacauuugaagaaagug

SEQ ID NO: 810974 - RNA, 20 nt, Artificial Sequence
  Synthetic
aucauuauaaagagaaagug

SEQ ID NO: 810975 - RNA, 20 nt, Artificial Sequence
  Synthetic
aaaaucagugagagaaagug

SEQ ID NO: 810976 - RNA, 20 nt, Artificial Sequence
  Synthetic
aaugacaaguagagaaagug

SEQ ID NO: 810977 - RNA, 20 nt, Artificial Sequence
  Synthetic
cugagauguuuuagaaagug

SEQ ID NO: 810978 - RNA, 20 nt, Artificial Sequence
  Synthetic
caccucagccuccgaaagug

SEQ ID NO: 810979 - RNA, 20 nt, Artificial Sequence
  Synthetic
uaaaaaugaacuugaaagug

SEQ ID NO: 810980 - RNA, 20 nt, Artificial Sequence
  Synthetic
uggagcuaagcuugaaagug

SEQ ID NO: 810981 - RNA, 20 nt, Artificial Sequence
  Synthetic
ucugcccaauguugaaagug

SEQ ID NO: 810982 - RNA, 20 nt, Artificial Sequence
  Synthetic
acaugaucccucauaaagug

SEQ ID NO: 810983 - RNA, 20 nt, Artificial Sequence
  Synthetic
aagaaaugaaggauaaagug

SEQ ID NO: 810984 - RNA, 20 nt, Artificial Sequence
  Synthetic
auacaguguuaccuaaagug

SEQ ID NO: 810985 - RNA, 20 nt, Artificial Sequence
  Synthetic
ugaagacaggagguaaagug

SEQ ID NO: 810986 - RNA, 20 nt, Artificial Sequence
  Synthetic
uauuuggaagaauuaaagug

SEQ ID NO: 810987 - RNA, 20 nt, Artificial Sequence
  Synthetic
aagcucuccaccuuaaagug

SEQ ID NO: 810988 - RNA, 20 nt, Artificial Sequence
  Synthetic
auaucaugguaguuaaagug

SEQ ID NO: 810989 - RNA, 20 nt, Artificial Sequence
  Synthetic
aaauauuacuuguuaaagug

SEQ ID NO: 810990 - RNA, 20 nt, Artificial Sequence
  Synthetic
ucuuaggaagaugacaagug

SEQ ID NO: 810991 - RNA, 20 nt, Artificial Sequence
  Synthetic
aauuaguguuucaccaagug

SEQ ID NO: 810992 - RNA, 20 nt, Artificial Sequence
  Synthetic
aauggcguuagccccaagug

SEQ ID NO: 810993 - RNA, 20 nt, Artificial Sequence
  Synthetic
accuuugaaaaauccaagug

SEQ ID NO: 810994 - RNA, 20 nt, Artificial Sequence
  Synthetic
ucaaaaucaccuuccaagug

SEQ ID NO: 810995 - RNA, 20 nt, Artificial Sequence
  Synthetic
ugggugaagugucgcaagug

SEQ ID NO: 810996 - RNA, 20 nt, Artificial Sequence
  Synthetic
ccacaucuaagcugcaagug

SEQ ID NO: 810997 - RNA, 20 nt, Artificial Sequence
  Synthetic
uuuucuaaaauuaucaagug

SEQ ID NO: 810998 - RNA, 20 nt, Artificial Sequence
  Synthetic
acagacugccuucucaagug

SEQ ID NO: 810999 - RNA, 20 nt, Artificial Sequence
  Synthetic
uggugaugacuuuucaagug

SEQ ID NO: 811000 - RNA, 20 nt, Artificial Sequence
  Synthetic
uuuugaaaaaacaagaagug

SEQ ID NO: 811001 - RNA, 20 nt, Artificial Sequence
  Synthetic
cugagccacuagcagaagug

SEQ ID NO: 811002 - RNA, 20 nt, Artificial Sequence
  Synthetic
auucuuugaucucagaagug

SEQ ID NO: 811003 - RNA, 20 nt, Artificial Sequence
  Synthetic
aaacaccugagucagaagug

SEQ ID NO: 811004 - RNA, 20 nt, Artificial Sequence
  Synthetic
uacauuuuaguagagaagug

SEQ ID NO: 811005 - RNA, 20 nt, Artificial Sequence
  Synthetic
uaaaauggaaaugagaagug

SEQ ID NO: 811006 - RNA, 20 nt, Artificial Sequence
  Synthetic
ugauuuuuaccugagaagug

SEQ ID NO: 811007 - RNA, 20 nt, Artificial Sequence
  Synthetic
aaaaacccaaaauagaagug

SEQ ID NO: 811008 - RNA, 20 nt, Artificial Sequence
  Synthetic
acucagauaagaaggaagug

SEQ ID NO: 811009 - RNA, 20 nt, Artificial Sequence
  Synthetic
auaaagaucugaaggaagug

SEQ ID NO: 811010 - RNA, 20 nt, Artificial Sequence
  Synthetic
ugcaggcuguacaggaagug

SEQ ID NO: 811011 - RNA, 20 nt, Artificial Sequence
  Synthetic
agggaccaaaguaggaagug

SEQ ID NO: 811012 - RNA, 20 nt, Artificial Sequence
  Synthetic
aucuaugaauaagggaagug

SEQ ID NO: 811013 - RNA, 20 nt, Artificial Sequence
  Synthetic
ucaaaagacauugggaagug

SEQ ID NO: 811014 - RNA, 20 nt, Artificial Sequence
  Synthetic
cccaccauaauauggaagug

SEQ ID NO: 811015 - RNA, 20 nt, Artificial Sequence
  Synthetic
agaucuggaaaguggaagug

SEQ ID NO: 811016 - RNA, 20 nt, Artificial Sequence
  Synthetic
ucugaacguguuuggaagug

SEQ ID NO: 811017 - RNA, 20 nt, Artificial Sequence
  Synthetic
aagcauuggagacugaagug

SEQ ID NO: 811018 - RNA, 20 nt, Artificial Sequence
  Synthetic
uucacaaggaaaaauaagug

SEQ ID NO: 811019 - RNA, 20 nt, Artificial Sequence
  Synthetic
aguuuguaaaugcauaagug

SEQ ID NO: 811020 - RNA, 20 nt, Artificial Sequence
  Synthetic
uuauaaauaaccuauaagug

SEQ ID NO: 811021 - RNA, 20 nt, Artificial Sequence
  Synthetic
aaugaaaaguggccuaagug

SEQ ID NO: 811022 - RNA, 20 nt, Artificial Sequence
  Synthetic
acaaacuguucuccuaagug

SEQ ID NO: 811023 - RNA, 20 nt, Artificial Sequence
  Synthetic
cugaucuuggaagcuaagug

SEQ ID NO: 811024 - RNA, 20 nt, Artificial Sequence
  Synthetic
aaaucaaacuugaguaagug

SEQ ID NO: 811025 - RNA, 20 nt, Artificial Sequence
  Synthetic
cuguucuaaagauguaagug

SEQ ID NO: 811026 - RNA, 20 nt, Artificial Sequence
  Synthetic
ucagaaaacugauguaagug

SEQ ID NO: 811027 - RNA, 20 nt, Artificial Sequence
  Synthetic
uauuuauguauuuguaagug

SEQ ID NO: 811028 - RNA, 20 nt, Artificial Sequence
  Synthetic
uuuuuaaaaguuauuaagug

SEQ ID NO: 811029 - RNA, 20 nt, Artificial Sequence
  Synthetic
cuuuagguuuggcuuaagug

SEQ ID NO: 811030 - RNA, 20 nt, Artificial Sequence
  Synthetic
accucuauuggauuuaagug

SEQ ID NO: 811031 - RNA, 20 nt, Artificial Sequence
  Synthetic
aguuugacagaguuuaagug

SEQ ID NO: 811032 - RNA, 20 nt, Artificial Sequence
  Synthetic
auagaacuguauaaacagug

SEQ ID NO: 811033 - RNA, 20 nt, Artificial Sequence
  Synthetic
aaauagacaaacuaacagug

SEQ ID NO: 811034 - RNA, 20 nt, Artificial Sequence
  Synthetic
aauuagaccuguuaacagug

SEQ ID NO: 811035 - RNA, 20 nt, Artificial Sequence
  Synthetic
agauggucauacacacagug

SEQ ID NO: 811036 - RNA, 20 nt, Artificial Sequence
  Synthetic
uugaccagggucacacagug

SEQ ID NO: 811037 - RNA, 20 nt, Artificial Sequence
  Synthetic
uaaaauggucugacacagug

SEQ ID NO: 811038 - RNA, 20 nt, Artificial Sequence
  Synthetic
uggguguggugaccacagug

SEQ ID NO: 811039 - RNA, 20 nt, Artificial Sequence
  Synthetic
aaccauuguggaagacagug

SEQ ID NO: 811040 - RNA, 20 nt, Artificial Sequence
  Synthetic
cugcaaugaugaagacagug

SEQ ID NO: 811041 - RNA, 20 nt, Artificial Sequence
  Synthetic
cacagcaagcugagacagug

SEQ ID NO: 811042 - RNA, 20 nt, Artificial Sequence
  Synthetic
caagaaaggccacgacagug

SEQ ID NO: 811043 - RNA, 20 nt, Artificial Sequence
  Synthetic
aaacccaacagaggacagug

SEQ ID NO: 811044 - RNA, 20 nt, Artificial Sequence
  Synthetic
cucaaagaccacugacagug

SEQ ID NO: 811045 - RNA, 20 nt, Artificial Sequence
  Synthetic
agagggcaguugugacagug

SEQ ID NO: 811046 - RNA, 20 nt, Artificial Sequence
  Synthetic
uccgucuaauauugacagug

SEQ ID NO: 811047 - RNA, 20 nt, Artificial Sequence
  Synthetic
ucugucuaauguugacagug

SEQ ID NO: 811048 - RNA, 20 nt, Artificial Sequence
  Synthetic
agucauugugaaaaccagug

SEQ ID NO: 811049 - RNA, 20 nt, Artificial Sequence
  Synthetic
cugcaccacuugcaccagug

SEQ ID NO: 811050 - RNA, 20 nt, Artificial Sequence
  Synthetic
cacuaggcagugccccagug

SEQ ID NO: 811051 - RNA, 20 nt, Artificial Sequence
  Synthetic
uacuaggcagugccccagug

SEQ ID NO: 811052 - RNA, 20 nt, Artificial Sequence
  Synthetic
cgcuaggcagugccccagug

SEQ ID NO: 811053 - RNA, 20 nt, Artificial Sequence
  Synthetic
ucgggguguccuccccagug

SEQ ID NO: 811054 - RNA, 20 nt, Artificial Sequence
  Synthetic
aucucaaaauuaucccagug

SEQ ID NO: 811055 - RNA, 20 nt, Artificial Sequence
  Synthetic
ucauguuguuuuagccagug

SEQ ID NO: 811056 - RNA, 20 nt, Artificial Sequence
  Synthetic
cuugcacacucccuccagug

SEQ ID NO: 811057 - RNA, 20 nt, Artificial Sequence
  Synthetic
cccaugaagaccuuccagug

SEQ ID NO: 811058 - RNA, 20 nt, Artificial Sequence
  Synthetic
auacuauccugaaagcagug

SEQ ID NO: 811059 - RNA, 20 nt, Artificial Sequence
  Synthetic
ugaggcugagggcagcagug

SEQ ID NO: 811060 - RNA, 20 nt, Artificial Sequence
  Synthetic
uuagagugcaugcagcagug

SEQ ID NO: 811061 - RNA, 20 nt, Artificial Sequence
  Synthetic
auacagaaaagugagcagug

SEQ ID NO: 811062 - RNA, 20 nt, Artificial Sequence
  Synthetic
agcucuguaagaaggcagug

SEQ ID NO: 811063 - RNA, 20 nt, Artificial Sequence
  Synthetic
aauauggaaauuuggcagug

SEQ ID NO: 811064 - RNA, 20 nt, Artificial Sequence
  Synthetic
ugaaauguauuuaugcagug

SEQ ID NO: 811065 - RNA, 20 nt, Artificial Sequence
  Synthetic
ccucaguagcaacugcagug

SEQ ID NO: 811066 - RNA, 20 nt, Artificial Sequence
  Synthetic
cucagauggcuucugcagug

SEQ ID NO: 811067 - RNA, 20 nt, Artificial Sequence
  Synthetic
agguugguuuuucugcagug

SEQ ID NO: 811068 - RNA, 20 nt, Artificial Sequence
  Synthetic
uuaauucaagcaaaucagug

SEQ ID NO: 811069 - RNA, 20 nt, Artificial Sequence
  Synthetic
aagugauuagagaaucagug

SEQ ID NO: 811070 - RNA, 20 nt, Artificial Sequence
  Synthetic
aagagucaggaccaucagug

SEQ ID NO: 811071 - RNA, 20 nt, Artificial Sequence
  Synthetic
uaaaaacauagccaucagug

SEQ ID NO: 811072 - RNA, 20 nt, Artificial Sequence
  Synthetic
auccuaaaaguggaucagug

SEQ ID NO: 811073 - RNA, 20 nt, Artificial Sequence
  Synthetic
cauauuuguauguaucagug

SEQ ID NO: 811074 - RNA, 20 nt, Artificial Sequence
  Synthetic
uaaauaccaccuacucagug

SEQ ID NO: 811075 - RNA, 20 nt, Artificial Sequence
  Synthetic
auguuugucuuaccucagug

SEQ ID NO: 811076 - RNA, 20 nt, Artificial Sequence
  Synthetic
uacaggcucuugccucagug

SEQ ID NO: 811077 - RNA, 20 nt, Artificial Sequence
  Synthetic
aaccauuguggaagucagug

SEQ ID NO: 811078 - RNA, 20 nt, Artificial Sequence
  Synthetic
auccaaaggcuuagucagug

SEQ ID NO: 811079 - RNA, 20 nt, Artificial Sequence
  Synthetic
cuauuccauccaugucagug

SEQ ID NO: 811080 - RNA, 20 nt, Artificial Sequence
  Synthetic
uugaaacuaggaauucagug

SEQ ID NO: 811081 - RNA, 20 nt, Artificial Sequence
  Synthetic
acuuuuuuuuugcuucagug

SEQ ID NO: 811082 - RNA, 20 nt, Artificial Sequence
  Synthetic
acuuacagcacauuucagug

SEQ ID NO: 811083 - RNA, 20 nt, Artificial Sequence
  Synthetic
aacacauaguacuuucagug

SEQ ID NO: 811084 - RNA, 20 nt, Artificial Sequence
  Synthetic
uacaauuugauguuucagug

SEQ ID NO: 811085 - RNA, 20 nt, Artificial Sequence
  Synthetic
aauaggauuucuuuucagug

SEQ ID NO: 811086 - RNA, 20 nt, Artificial Sequence
  Synthetic
caaaaaacaguuuuucagug

SEQ ID NO: 811087 - RNA, 20 nt, Artificial Sequence
  Synthetic
augagauaaagaaaagagug

SEQ ID NO: 811088 - RNA, 20 nt, Artificial Sequence
  Synthetic
uccugucccugaaaagagug

SEQ ID NO: 811089 - RNA, 20 nt, Artificial Sequence
  Synthetic
aaacaagguaguaaagagug

SEQ ID NO: 811090 - RNA, 20 nt, Artificial Sequence
  Synthetic
uaaauuuucuuccaagagug

SEQ ID NO: 811091 - RNA, 20 nt, Artificial Sequence
  Synthetic
acggacagugaggaagagug

SEQ ID NO: 811092 - RNA, 20 nt, Artificial Sequence
  Synthetic
ugcuuguaaaaauaagagug

SEQ ID NO: 811093 - RNA, 20 nt, Artificial Sequence
  Synthetic
ccagccugggugacagagug

SEQ ID NO: 811094 - RNA, 20 nt, Artificial Sequence
  Synthetic
uauuagcuaaaaagagagug

SEQ ID NO: 811095 - RNA, 20 nt, Artificial Sequence
  Synthetic
aguaaggaagaaagagagug

SEQ ID NO: 811096 - RNA, 20 nt, Artificial Sequence
  Synthetic
cuacaagccagaagagagug

SEQ ID NO: 811097 - RNA, 20 nt, Artificial Sequence
  Synthetic
aauugguacugcagagagug

SEQ ID NO: 811098 - RNA, 20 nt, Artificial Sequence
  Synthetic
aaaaagaaauagggagagug

SEQ ID NO: 811099 - RNA, 20 nt, Artificial Sequence
  Synthetic
acugggauuuugggagagug

SEQ ID NO: 811100 - RNA, 20 nt, Artificial Sequence
  Synthetic
agauuucugauuggagagug

SEQ ID NO: 811101 - RNA, 20 nt, Artificial Sequence
  Synthetic
acuuggcccuuuugagagug

SEQ ID NO: 811102 - RNA, 20 nt, Artificial Sequence
  Synthetic
aacggaggacuacuagagug

SEQ ID NO: 811103 - RNA, 20 nt, Artificial Sequence
  Synthetic
aauuugguaccaguagagug

SEQ ID NO: 811104 - RNA, 20 nt, Artificial Sequence
  Synthetic
cauucucagaugguagagug

SEQ ID NO: 811105 - RNA, 20 nt, Artificial Sequence
  Synthetic
ugcuagggacuauuagagug

SEQ ID NO: 811106 - RNA, 20 nt, Artificial Sequence
  Synthetic
auuuccuauuacuuagagug

SEQ ID NO: 811107 - RNA, 20 nt, Artificial Sequence
  Synthetic
uaucagaacuccuacgagug

SEQ ID NO: 811108 - RNA, 20 nt, Artificial Sequence
  Synthetic
uggacuuucugggucgagug

SEQ ID NO: 811109 - RNA, 20 nt, Artificial Sequence
  Synthetic
uuuaacucucccaaggagug

SEQ ID NO: 811110 - RNA, 20 nt, Artificial Sequence
  Synthetic
agaaggagggagaaggagug

SEQ ID NO: 811111 - RNA, 20 nt, Artificial Sequence
  Synthetic
aagaggacaaaagaggagug

SEQ ID NO: 811112 - RNA, 20 nt, Artificial Sequence
  Synthetic
uaacuguucacagaggagug

SEQ ID NO: 811113 - RNA, 20 nt, Artificial Sequence
  Synthetic
cuagggaguggguaggagug

SEQ ID NO: 811114 - RNA, 20 nt, Artificial Sequence
  Synthetic
uaguaacccagaagggagug

SEQ ID NO: 811115 - RNA, 20 nt, Artificial Sequence
  Synthetic
aagccauuuuaacgggagug

SEQ ID NO: 811116 - RNA, 20 nt, Artificial Sequence
  Synthetic
cccuugaaugaaggggagug

SEQ ID NO: 811117 - RNA, 20 nt, Artificial Sequence
  Synthetic
uaaccaauuuacugggagug

SEQ ID NO: 811118 - RNA, 20 nt, Artificial Sequence
  Synthetic
auugauacgcucugggagug

SEQ ID NO: 811119 - RNA, 20 nt, Artificial Sequence
  Synthetic
augaaauaucucugggagug

SEQ ID NO: 811120 - RNA, 20 nt, Artificial Sequence
  Synthetic
aaguggggagcuugggagug

SEQ ID NO: 811121 - RNA, 20 nt, Artificial Sequence
  Synthetic
agaaguucagaaauggagug

SEQ ID NO: 811122 - RNA, 20 nt, Artificial Sequence
  Synthetic
aauaaaaauguaauggagug

SEQ ID NO: 811123 - RNA, 20 nt, Artificial Sequence
  Synthetic
cuuucgcccaggcuggagug

SEQ ID NO: 811124 - RNA, 20 nt, Artificial Sequence
  Synthetic
uuguugcccaggcuggagug

SEQ ID NO: 811125 - RNA, 20 nt, Artificial Sequence
  Synthetic
ccaaggaaaagaaaugagug

SEQ ID NO: 811126 - RNA, 20 nt, Artificial Sequence
  Synthetic
ucaauucccaccuaugagug

SEQ ID NO: 811127 - RNA, 20 nt, Artificial Sequence
  Synthetic
cauuaaagaaaaucugagug

SEQ ID NO: 811128 - RNA, 20 nt, Artificial Sequence
  Synthetic
aacugccagucaugugagug

SEQ ID NO: 811129 - RNA, 20 nt, Artificial Sequence
  Synthetic
uguggcagccaaguugagug

SEQ ID NO: 811130 - RNA, 20 nt, Artificial Sequence
  Synthetic
uuuuaagaauggguugagug

SEQ ID NO: 811131 - RNA, 20 nt, Artificial Sequence
  Synthetic
ucuuaacauucauuugagug

SEQ ID NO: 811132 - RNA, 20 nt, Artificial Sequence
  Synthetic
uucaaaaugagauuugagug

SEQ ID NO: 811133 - RNA, 20 nt, Artificial Sequence
  Synthetic
uuuuauagguggaaauagug

SEQ ID NO: 811134 - RNA, 20 nt, Artificial Sequence
  Synthetic
acagcaaugcaauaauagug

SEQ ID NO: 811135 - RNA, 20 nt, Artificial Sequence
  Synthetic
uaaucauuuccuuaauagug

SEQ ID NO: 811136 - RNA, 20 nt, Artificial Sequence
  Synthetic
uaaaggagcaaaucauagug

SEQ ID NO: 811137 - RNA, 20 nt, Artificial Sequence
  Synthetic
ccuuaacuugauucauagug

SEQ ID NO: 811138 - RNA, 20 nt, Artificial Sequence
  Synthetic
uguacuaaacauagauagug

SEQ ID NO: 811139 - RNA, 20 nt, Artificial Sequence
  Synthetic
ucaccugaucagggauagug

SEQ ID NO: 811140 - RNA, 20 nt, Artificial Sequence
  Synthetic
cuuaaaaauacuugauagug

SEQ ID NO: 811141 - RNA, 20 nt, Artificial Sequence
  Synthetic
auuacuaguuaaaacuagug

SEQ ID NO: 811142 - RNA, 20 nt, Artificial Sequence
  Synthetic
ugcuggcuuguuuacuagug

SEQ ID NO: 811143 - RNA, 20 nt, Artificial Sequence
  Synthetic
aaauaaaugaccuccuagug

SEQ ID NO: 811144 - RNA, 20 nt, Artificial Sequence
  Synthetic
uuugaguuuaaaaucuagug

SEQ ID NO: 811145 - RNA, 20 nt, Artificial Sequence
  Synthetic
ccaucucccagcgucuagug

SEQ ID NO: 811146 - RNA, 20 nt, Artificial Sequence
  Synthetic
uuugcaguaaaaaaguagug

SEQ ID NO: 811147 - RNA, 20 nt, Artificial Sequence
  Synthetic
aggguuuugccucaguagug

SEQ ID NO: 811148 - RNA, 20 nt, Artificial Sequence
  Synthetic
ccagugguacugagguagug

SEQ ID NO: 811149 - RNA, 20 nt, Artificial Sequence
  Synthetic
caacuuuuugugagguagug

SEQ ID NO: 811150 - RNA, 20 nt, Artificial Sequence
  Synthetic
agaggcuacaaaggguagug

SEQ ID NO: 811151 - RNA, 20 nt, Artificial Sequence
  Synthetic
agaggcugugaaggguagug

SEQ ID NO: 811152 - RNA, 20 nt, Artificial Sequence
  Synthetic
uaggaauaauauugguagug

SEQ ID NO: 811153 - RNA, 20 nt, Artificial Sequence
  Synthetic
accugcaaauaaauguagug

SEQ ID NO: 811154 - RNA, 20 nt, Artificial Sequence
  Synthetic
aaauaaucauaaauguagug

SEQ ID NO: 811155 - RNA, 20 nt, Artificial Sequence
  Synthetic
aggcuucugauaaauuagug

SEQ ID NO: 811156 - RNA, 20 nt, Artificial Sequence
  Synthetic
cauuucccugcugauuagug

SEQ ID NO: 811157 - RNA, 20 nt, Artificial Sequence
  Synthetic
ccugaaaaagagccuuagug

SEQ ID NO: 811158 - RNA, 20 nt, Artificial Sequence
  Synthetic
ugggauacucaagcuuagug

SEQ ID NO: 811159 - RNA, 20 nt, Artificial Sequence
  Synthetic
aaauaacauguugcuuagug

SEQ ID NO: 811160 - RNA, 20 nt, Artificial Sequence
  Synthetic
uuuaggagagaauguuagug

SEQ ID NO: 811161 - RNA, 20 nt, Artificial Sequence
  Synthetic
ugauuuccugaauguuagug

SEQ ID NO: 811162 - RNA, 20 nt, Artificial Sequence
  Synthetic
aggcuuugaaaaauuuagug

SEQ ID NO: 811163 - RNA, 20 nt, Artificial Sequence
  Synthetic
cccuuagggagcauuuagug

SEQ ID NO: 811164 - RNA, 20 nt, Artificial Sequence
  Synthetic
uguucagcauuuauuuagug

SEQ ID NO: 811165 - RNA, 20 nt, Artificial Sequence
  Synthetic
cuuugaucuguaguuuagug

SEQ ID NO: 811166 - RNA, 20 nt, Artificial Sequence
  Synthetic
cgccuggcuacuguuuagug

SEQ ID NO: 811167 - RNA, 20 nt, Artificial Sequence
  Synthetic
aagucaauaugguuuuagug

SEQ ID NO: 811168 - RNA, 20 nt, Artificial Sequence
  Synthetic
uucacuggagauuuuuagug

SEQ ID NO: 811169 - RNA, 20 nt, Artificial Sequence
  Synthetic
uccuuugguaguuuuuagug

SEQ ID NO: 811170 - RNA, 20 nt, Artificial Sequence
  Synthetic
aacagugaaaacagaacgug

SEQ ID NO: 811171 - RNA, 20 nt, Artificial Sequence
  Synthetic
augguuuuuuaaauaacgug

SEQ ID NO: 811172 - RNA, 20 nt, Artificial Sequence
  Synthetic
auguauaacuguauaacgug

SEQ ID NO: 811173 - RNA, 20 nt, Artificial Sequence
  Synthetic
uuaagucaggaauucacgug

SEQ ID NO: 811174 - RNA, 20 nt, Artificial Sequence
  Synthetic
aaguuagaggguaagacgug

SEQ ID NO: 811175 - RNA, 20 nt, Artificial Sequence
  Synthetic
agcguugguugugcgacgug

SEQ ID NO: 811176 - RNA, 20 nt, Artificial Sequence
  Synthetic
cugaucccucccaggacgug

SEQ ID NO: 811177 - RNA, 20 nt, Artificial Sequence
  Synthetic
ccaggugcccucucaccgug

SEQ ID NO: 811178 - RNA, 20 nt, Artificial Sequence
  Synthetic
aaccauuguggaagaccgug

SEQ ID NO: 811179 - RNA, 20 nt, Artificial Sequence
  Synthetic
ccuagccaacagaagccgug

SEQ ID NO: 811180 - RNA, 20 nt, Artificial Sequence
  Synthetic
cugaacuaaaagcauccgug

SEQ ID NO: 811181 - RNA, 20 nt, Artificial Sequence
  Synthetic
uuguggauuugcuauccgug

SEQ ID NO: 811182 - RNA, 20 nt, Artificial Sequence
  Synthetic
uaggcaaauaaauuuccgug

SEQ ID NO: 811183 - RNA, 20 nt, Artificial Sequence
  Synthetic
ucugccauggaggcagcgug

SEQ ID NO: 811184 - RNA, 20 nt, Artificial Sequence
  Synthetic
ccagcuucucaguucgcgug

SEQ ID NO: 811185 - RNA, 20 nt, Artificial Sequence
  Synthetic
cuaaacaguagccaggcgug

SEQ ID NO: 811186 - RNA, 20 nt, Artificial Sequence
  Synthetic
uggaauaaaauauuggcgug

SEQ ID NO: 811187 - RNA, 20 nt, Artificial Sequence
  Synthetic
uugaauccagaugcugcgug

SEQ ID NO: 811188 - RNA, 20 nt, Artificial Sequence
  Synthetic
ucuaaaaguagccaaucgug

SEQ ID NO: 811189 - RNA, 20 nt, Artificial Sequence
  Synthetic
ucaaggcacaauucaucgug

SEQ ID NO: 811190 - RNA, 20 nt, Artificial Sequence
  Synthetic
aggauugguaauuuaucgug

SEQ ID NO: 811191 - RNA, 20 nt, Artificial Sequence
  Synthetic
cacaaccuagaucccucgug

SEQ ID NO: 811192 - RNA, 20 nt, Artificial Sequence
  Synthetic
ugaggaugggaagggucgug

SEQ ID NO: 811193 - RNA, 20 nt, Artificial Sequence
  Synthetic
acacaccagggccugucgug

SEQ ID NO: 811194 - RNA, 20 nt, Artificial Sequence
  Synthetic
acacaccggggccugucgug

SEQ ID NO: 811195 - RNA, 20 nt, Artificial Sequence
  Synthetic
acacacuggggccugucgug

SEQ ID NO: 811196 - RNA, 20 nt, Artificial Sequence
  Synthetic
aaagaauguugacuuucgug

SEQ ID NO: 811197 - RNA, 20 nt, Artificial Sequence
  Synthetic
augagauguaaacaaaggug

SEQ ID NO: 811198 - RNA, 20 nt, Artificial Sequence
  Synthetic
auuucauaaggagaaaggug

SEQ ID NO: 811199 - RNA, 20 nt, Artificial Sequence
  Synthetic
aaauugcuucaagcaaggug

SEQ ID NO: 811200 - RNA, 20 nt, Artificial Sequence
  Synthetic
acuuaauagauugcaaggug

SEQ ID NO: 811201 - RNA, 20 nt, Artificial Sequence
  Synthetic
uuguggcuguguucaaggug

SEQ ID NO: 811202 - RNA, 20 nt, Artificial Sequence
  Synthetic
uuccaguguaagagaaggug

SEQ ID NO: 811203 - RNA, 20 nt, Artificial Sequence
  Synthetic
ugguuuuaagagagaaggug

SEQ ID NO: 811204 - RNA, 20 nt, Artificial Sequence
  Synthetic
ugagcauaaaguagaaggug

SEQ ID NO: 811205 - RNA, 20 nt, Artificial Sequence
  Synthetic
cacaaucccauccuaaggug

SEQ ID NO: 811206 - RNA, 20 nt, Artificial Sequence
  Synthetic
caacuaaccaaaguaaggug

SEQ ID NO: 811207 - RNA, 20 nt, Artificial Sequence
  Synthetic
uccggguagcugaacaggug

SEQ ID NO: 811208 - RNA, 20 nt, Artificial Sequence
  Synthetic
uaugucaaaaguaacaggug

SEQ ID NO: 811209 - RNA, 20 nt, Artificial Sequence
  Synthetic
uaguaccuauuuuacaggug

SEQ ID NO: 811210 - RNA, 20 nt, Artificial Sequence
  Synthetic
aaaacaaucucaaccaggug

SEQ ID NO: 811211 - RNA, 20 nt, Artificial Sequence
  Synthetic
auacaaaaauuaaccaggug

SEQ ID NO: 811212 - RNA, 20 nt, Artificial Sequence
  Synthetic
auacaaacauucaccaggug

SEQ ID NO: 811213 - RNA, 20 nt, Artificial Sequence
  Synthetic
aaaacaacccagaccaggug

SEQ ID NO: 811214 - RNA, 20 nt, Artificial Sequence
  Synthetic
aaugugauacaagccaggug

SEQ ID NO: 811215 - RNA, 20 nt, Artificial Sequence
  Synthetic
aauaaaaucucagccaggug

SEQ ID NO: 811216 - RNA, 20 nt, Artificial Sequence
  Synthetic
auacaaaaauuagccaggug

SEQ ID NO: 811217 - RNA, 20 nt, Artificial Sequence
  Synthetic
uacaaaacauuagccaggug

SEQ ID NO: 811218 - RNA, 20 nt, Artificial Sequence
  Synthetic
aaaaaagaauaggccaggug

SEQ ID NO: 811219 - RNA, 20 nt, Artificial Sequence
  Synthetic
agagcaaucagggccaggug

SEQ ID NO: 811220 - RNA, 20 nt, Artificial Sequence
  Synthetic
aagaaagagugggccaggug

SEQ ID NO: 811221 - RNA, 20 nt, Artificial Sequence
  Synthetic
aguagauucauggccaggug

SEQ ID NO: 811222 - RNA, 20 nt, Artificial Sequence
  Synthetic
auacuugagauggccaggug

SEQ ID NO: 811223 - RNA, 20 nt, Artificial Sequence
  Synthetic
aaauaaucaguggccaggug

SEQ ID NO: 811224 - RNA, 20 nt, Artificial Sequence
  Synthetic
uuguuaaaauuggccaggug

SEQ ID NO: 811225 - RNA, 20 nt, Artificial Sequence
  Synthetic
uagaagguauuggccaggug

SEQ ID NO: 811226 - RNA, 20 nt, Artificial Sequence
  Synthetic
ugaaaguuugcaagcaggug

SEQ ID NO: 811227 - RNA, 20 nt, Artificial Sequence
  Synthetic
uccaucaggggacgcaggug

SEQ ID NO: 811228 - RNA, 20 nt, Artificial Sequence
  Synthetic
ugcaccuuccagggcaggug

SEQ ID NO: 811229 - RNA, 20 nt, Artificial Sequence
  Synthetic
aagaagggcaaaaagaggug

SEQ ID NO: 811230 - RNA, 20 nt, Artificial Sequence
  Synthetic
ugugaaugccgagagaggug

SEQ ID NO: 811231 - RNA, 20 nt, Artificial Sequence
  Synthetic
uaugaaugcugagagaggug

SEQ ID NO: 811232 - RNA, 20 nt, Artificial Sequence
  Synthetic
cuuaaugcuauugagaggug

SEQ ID NO: 811233 - RNA, 20 nt, Artificial Sequence
  Synthetic
agguacugagauuagaggug

SEQ ID NO: 811234 - RNA, 20 nt, Artificial Sequence
  Synthetic
cacuuugggaggccgaggug

SEQ ID NO: 811235 - RNA, 20 nt, Artificial Sequence
  Synthetic
ccgaggccugucgcgaggug

SEQ ID NO: 811236 - RNA, 20 nt, Artificial Sequence
  Synthetic
uuaaaauguaguaggaggug

SEQ ID NO: 811237 - RNA, 20 nt, Artificial Sequence
  Synthetic
ugccaccgucuguggaggug

SEQ ID NO: 811238 - RNA, 20 nt, Artificial Sequence
  Synthetic
aauccccaauguuggaggug

SEQ ID NO: 811239 - RNA, 20 nt, Artificial Sequence
  Synthetic
aauucccaguguuggaggug

SEQ ID NO: 811240 - RNA, 20 nt, Artificial Sequence
  Synthetic
ccaauggauauuuggaggug

SEQ ID NO: 811241 - RNA, 20 nt, Artificial Sequence
  Synthetic
uuuuauuaaaauaugaggug

SEQ ID NO: 811242 - RNA, 20 nt, Artificial Sequence
  Synthetic
uauguuaagccacugaggug

SEQ ID NO: 811243 - RNA, 20 nt, Artificial Sequence
  Synthetic
uuagaaggguaugugaggug

SEQ ID NO: 811244 - RNA, 20 nt, Artificial Sequence
  Synthetic
uuuuauuggccugugaggug

SEQ ID NO: 811245 - RNA, 20 nt, Artificial Sequence
  Synthetic
aaagauaauugcuugaggug

SEQ ID NO: 811246 - RNA, 20 nt, Artificial Sequence
  Synthetic
aaugaagcccaaaauaggug

SEQ ID NO: 811247 - RNA, 20 nt, Artificial Sequence
  Synthetic
cauauucucacucauaggug

SEQ ID NO: 811248 - RNA, 20 nt, Artificial Sequence
  Synthetic
auuuggaaacuuuguaggug

SEQ ID NO: 811249 - RNA, 20 nt, Artificial Sequence
  Synthetic
auuucaucuuugauuaggug

SEQ ID NO: 811250 - RNA, 20 nt, Artificial Sequence
  Synthetic
aauucuucaaaucuuaggug

SEQ ID NO: 811251 - RNA, 20 nt, Artificial Sequence
  Synthetic
caaaucaugacuuuuaggug

SEQ ID NO: 811252 - RNA, 20 nt, Artificial Sequence
  Synthetic
aaccauuguggaagucggug

SEQ ID NO: 811253 - RNA, 20 nt, Artificial Sequence
  Synthetic
ugugugugugucugucggug

SEQ ID NO: 811254 - RNA, 20 nt, Artificial Sequence
  Synthetic
aaccacaacaggaaagggug

SEQ ID NO: 811255 - RNA, 20 nt, Artificial Sequence
  Synthetic
cuguggggaacacaagggug

SEQ ID NO: 811256 - RNA, 20 nt, Artificial Sequence
  Synthetic
uuaggauggaaucaagggug

SEQ ID NO: 811257 - RNA, 20 nt, Artificial Sequence
  Synthetic
cccuguacuagggaagggug

SEQ ID NO: 811258 - RNA, 20 nt, Artificial Sequence
  Synthetic
uacaaaaaauuagcagggug

SEQ ID NO: 811259 - RNA, 20 nt, Artificial Sequence
  Synthetic
augucaucaccuugagggug

SEQ ID NO: 811260 - RNA, 20 nt, Artificial Sequence
  Synthetic
augaagagaugcauagggug

SEQ ID NO: 811261 - RNA, 20 nt, Artificial Sequence
  Synthetic
ugucacuuagugauagggug

SEQ ID NO: 811262 - RNA, 20 nt, Artificial Sequence
  Synthetic
ugguaccaagcccuagggug

SEQ ID NO: 811263 - RNA, 20 nt, Artificial Sequence
  Synthetic
auacaaaaauuacccgggug

SEQ ID NO: 811264 - RNA, 20 nt, Artificial Sequence
  Synthetic
uaaaaaaaauuagccgggug

SEQ ID NO: 811265 - RNA, 20 nt, Artificial Sequence
  Synthetic
auacaaaaauuagccgggug

SEQ ID NO: 811266 - RNA, 20 nt, Artificial Sequence
  Synthetic
aaugagaaacaggccgggug

SEQ ID NO: 811267 - RNA, 20 nt, Artificial Sequence
  Synthetic
cagcauguugcggccgggug

SEQ ID NO: 811268 - RNA, 20 nt, Artificial Sequence
  Synthetic
auaagaaaacgggccgggug

SEQ ID NO: 811269 - RNA, 20 nt, Artificial Sequence
  Synthetic
agaaauuuuuuggccgggug

SEQ ID NO: 811270 - RNA, 20 nt, Artificial Sequence
  Synthetic
ccauggaucaggggcgggug

SEQ ID NO: 811271 - RNA, 20 nt, Artificial Sequence
  Synthetic
caggggccuguuggcgggug

SEQ ID NO: 811272 - RNA, 20 nt, Artificial Sequence
  Synthetic
ccggggccugucaaggggug

SEQ ID NO: 811273 - RNA, 20 nt, Artificial Sequence
  Synthetic
caugauuguuucaaggggug

SEQ ID NO: 811274 - RNA, 20 nt, Artificial Sequence
  Synthetic
cagagccaugaugaggggug

SEQ ID NO: 811275 - RNA, 20 nt, Artificial Sequence
  Synthetic
ccccuugugcuuccggggug

SEQ ID NO: 811276 - RNA, 20 nt, Artificial Sequence
  Synthetic
ucagcaguuugagcggggug

SEQ ID NO: 811277 - RNA, 20 nt, Artificial Sequence
  Synthetic
auacaaaaaguagcggggug

SEQ ID NO: 811278 - RNA, 20 nt, Artificial Sequence
  Synthetic
cuggggccugucagggggug

SEQ ID NO: 811279 - RNA, 20 nt, Artificial Sequence
  Synthetic
ugguugggguggcgggggug

SEQ ID NO: 811280 - RNA, 20 nt, Artificial Sequence
  Synthetic
cugaggccugucggggggug

SEQ ID NO: 811281 - RNA, 20 nt, Artificial Sequence
  Synthetic
agcugauuugucugggggug

SEQ ID NO: 811282 - RNA, 20 nt, Artificial Sequence
  Synthetic
aaaaaaaaaaauugggggug

SEQ ID NO: 811283 - RNA, 20 nt, Artificial Sequence
  Synthetic
augcugggggguugggggug

SEQ ID NO: 811284 - RNA, 20 nt, Artificial Sequence
  Synthetic
aagcuauuugguugggggug

SEQ ID NO: 811285 - RNA, 20 nt, Artificial Sequence
  Synthetic
acuggugccuguugggggug

SEQ ID NO: 811286 - RNA, 20 nt, Artificial Sequence
  Synthetic
uauaggcacaggauggggug

SEQ ID NO: 811287 - RNA, 20 nt, Artificial Sequence
  Synthetic
augcugauguuacuggggug

SEQ ID NO: 811288 - RNA, 20 nt, Artificial Sequence
  Synthetic
agacagggucuccuggggug

SEQ ID NO: 811289 - RNA, 20 nt, Artificial Sequence
  Synthetic
auuagagaaucaguggggug

SEQ ID NO: 811290 - RNA, 20 nt, Artificial Sequence
  Synthetic
ccagggccugucguggggug

SEQ ID NO: 811291 - RNA, 20 nt, Artificial Sequence
  Synthetic
ccggggccugucguggggug

SEQ ID NO: 811292 - RNA, 20 nt, Artificial Sequence
  Synthetic
cuggggccugucguggggug

SEQ ID NO: 811293 - RNA, 20 nt, Artificial Sequence
  Synthetic
cuggggacugugguggggug

SEQ ID NO: 811294 - RNA, 20 nt, Artificial Sequence
  Synthetic
cuggggacugcuguggggug

SEQ ID NO: 811295 - RNA, 20 nt, Artificial Sequence
  Synthetic
cuggggccugcuguggggug

SEQ ID NO: 811296 - RNA, 20 nt, Artificial Sequence
  Synthetic
uaagaugagauuguggggug

SEQ ID NO: 811297 - RNA, 20 nt, Artificial Sequence
  Synthetic
cugggaacuguuguggggug

SEQ ID NO: 811298 - RNA, 20 nt, Artificial Sequence
  Synthetic
cuggggacuguuguggggug

SEQ ID NO: 811299 - RNA, 20 nt, Artificial Sequence
  Synthetic
ccggggccuguuguggggug

SEQ ID NO: 811300 - RNA, 20 nt, Artificial Sequence
  Synthetic
uauucuguugauuuggggug

SEQ ID NO: 811301 - RNA, 20 nt, Artificial Sequence
  Synthetic
augcacaauagacaugggug

SEQ ID NO: 811302 - RNA, 20 nt, Artificial Sequence
  Synthetic
cuguuuauucaucaugggug

SEQ ID NO: 811303 - RNA, 20 nt, Artificial Sequence
  Synthetic
aaagcaugcauugaugggug

SEQ ID NO: 811304 - RNA, 20 nt, Artificial Sequence
  Synthetic
agaugacggguugaugggug

SEQ ID NO: 811305 - RNA, 20 nt, Artificial Sequence
  Synthetic
auucaaaaauuaacugggug

SEQ ID NO: 811306 - RNA, 20 nt, Artificial Sequence
  Synthetic
uuuuaaugagcgccugggug

SEQ ID NO: 811307 - RNA, 20 nt, Artificial Sequence
  Synthetic
uaccaaaaauuagcugggug

SEQ ID NO: 811308 - RNA, 20 nt, Artificial Sequence
  Synthetic
aauacaaaauuagcugggug

SEQ ID NO: 811309 - RNA, 20 nt, Artificial Sequence
  Synthetic
auaaaaaacuuagcugggug

SEQ ID NO: 811310 - RNA, 20 nt, Artificial Sequence
  Synthetic
aagccuaauaaggcugggug

SEQ ID NO: 811311 - RNA, 20 nt, Artificial Sequence
  Synthetic
acaaugauauaggcugggug

SEQ ID NO: 811312 - RNA, 20 nt, Artificial Sequence
  Synthetic
acugaauucccggcugggug

SEQ ID NO: 811313 - RNA, 20 nt, Artificial Sequence
  Synthetic
ucaagcuaugcggcugggug

SEQ ID NO: 811314 - RNA, 20 nt, Artificial Sequence
  Synthetic
aaauuguaccgggcugggug

SEQ ID NO: 811315 - RNA, 20 nt, Artificial Sequence
  Synthetic
auaaagcagugggcugggug

SEQ ID NO: 811316 - RNA, 20 nt, Artificial Sequence
  Synthetic
ugucacuaccuugcugggug

SEQ ID NO: 811317 - RNA, 20 nt, Artificial Sequence
  Synthetic
uguaugauggaaucugggug

SEQ ID NO: 811318 - RNA, 20 nt, Artificial Sequence
  Synthetic
uuuuaaaaauuaucugggug

SEQ ID NO: 811319 - RNA, 20 nt, Artificial Sequence
  Synthetic
aaagugguuaccucugggug

SEQ ID NO: 811320 - RNA, 20 nt, Artificial Sequence
  Synthetic
uuaauguuuaugagugggug

SEQ ID NO: 811321 - RNA, 20 nt, Artificial Sequence
  Synthetic
uauaaagacaaaauugggug

SEQ ID NO: 811322 - RNA, 20 nt, Artificial Sequence
  Synthetic
uauguuauuaaaauugggug

SEQ ID NO: 811323 - RNA, 20 nt, Artificial Sequence
  Synthetic
ccacacccaaucauugggug

SEQ ID NO: 811324 - RNA, 20 nt, Artificial Sequence
  Synthetic
ucuagauaugggauugggug

SEQ ID NO: 811325 - RNA, 20 nt, Artificial Sequence
  Synthetic
ccucacccaaugauugggug

SEQ ID NO: 811326 - RNA, 20 nt, Artificial Sequence
  Synthetic
augaauuuucagcuugggug

SEQ ID NO: 811327 - RNA, 20 nt, Artificial Sequence
  Synthetic
auacaaaaauuaguugggug

SEQ ID NO: 811328 - RNA, 20 nt, Artificial Sequence
  Synthetic
ucauccuuuguuguugggug

SEQ ID NO: 811329 - RNA, 20 nt, Artificial Sequence
  Synthetic
uucaaaaugagauuugggug

SEQ ID NO: 811330 - RNA, 20 nt, Artificial Sequence
  Synthetic
uucagaaugagauuugggug

SEQ ID NO: 811331 - RNA, 20 nt, Artificial Sequence
  Synthetic
uucaagaugagauuugggug

SEQ ID NO: 811332 - RNA, 20 nt, Artificial Sequence
  Synthetic
uucuagaugagauuugggug

SEQ ID NO: 811333 - RNA, 20 nt, Artificial Sequence
  Synthetic
uuuaauaugagauuugggug

SEQ ID NO: 811334 - RNA, 20 nt, Artificial Sequence
  Synthetic
uucaaggugagauuugggug

SEQ ID NO: 811335 - RNA, 20 nt, Artificial Sequence
  Synthetic
uucaagacgggauuugggug

SEQ ID NO: 811336 - RNA, 20 nt, Artificial Sequence
  Synthetic
agucucuucaacaaauggug

SEQ ID NO: 811337 - RNA, 20 nt, Artificial Sequence
  Synthetic
ccuauaaauuuuaaauggug

SEQ ID NO: 811338 - RNA, 20 nt, Artificial Sequence
  Synthetic
cacuuuggcccacaauggug

SEQ ID NO: 811339 - RNA, 20 nt, Artificial Sequence
  Synthetic
uaguuacaauagcaauggug

SEQ ID NO: 811340 - RNA, 20 nt, Artificial Sequence
  Synthetic
uuuagaaaaaaagaauggug

SEQ ID NO: 811341 - RNA, 20 nt, Artificial Sequence
  Synthetic
aaaauucuacuagaauggug

SEQ ID NO: 811342 - RNA, 20 nt, Artificial Sequence
  Synthetic
ucauggcaucuggaauggug

SEQ ID NO: 811343 - RNA, 20 nt, Artificial Sequence
  Synthetic
uuuugcuuaagauaauggug

SEQ ID NO: 811344 - RNA, 20 nt, Artificial Sequence
  Synthetic
cucucucuugacuaauggug

SEQ ID NO: 811345 - RNA, 20 nt, Artificial Sequence
  Synthetic
cagacucucucuucauggug

SEQ ID NO: 811346 - RNA, 20 nt, Artificial Sequence
  Synthetic
acgguccuuaggggauggug

SEQ ID NO: 811347 - RNA, 20 nt, Artificial Sequence
  Synthetic
aaaaacaacagaugauggug

SEQ ID NO: 811348 - RNA, 20 nt, Artificial Sequence
  Synthetic
ucugauggccagugauggug

SEQ ID NO: 811349 - RNA, 20 nt, Artificial Sequence
  Synthetic
cucaaacuuaaccuauggug

SEQ ID NO: 811350 - RNA, 20 nt, Artificial Sequence
  Synthetic
aguucaggguuccuauggug

SEQ ID NO: 811351 - RNA, 20 nt, Artificial Sequence
  Synthetic
uuuauuauuauugacuggug

SEQ ID NO: 811352 - RNA, 20 nt, Artificial Sequence
  Synthetic
ucauuggugauuuacuggug

SEQ ID NO: 811353 - RNA, 20 nt, Artificial Sequence
  Synthetic
uccaagaucagggccuggug

SEQ ID NO: 811354 - RNA, 20 nt, Artificial Sequence
  Synthetic
aauaaaaaaauuagcuggug

SEQ ID NO: 811355 - RNA, 20 nt, Artificial Sequence
  Synthetic
ugauuuugaugccgcuggug

SEQ ID NO: 811356 - RNA, 20 nt, Artificial Sequence
  Synthetic
ugggcgcguuuaggcuggug

SEQ ID NO: 811357 - RNA, 20 nt, Artificial Sequence
  Synthetic
uuccuuauuuauggcuggug

SEQ ID NO: 811358 - RNA, 20 nt, Artificial Sequence
  Synthetic
acagaaagcccuggcuggug

SEQ ID NO: 811359 - RNA, 20 nt, Artificial Sequence
  Synthetic
aaaaauaccagaugcuggug

SEQ ID NO: 811360 - RNA, 20 nt, Artificial Sequence
  Synthetic
acaaauguaccacucuggug

SEQ ID NO: 811361 - RNA, 20 nt, Artificial Sequence
  Synthetic
augcuagugucucucuggug

SEQ ID NO: 811362 - RNA, 20 nt, Artificial Sequence
  Synthetic
cuggcauuuggugucuggug

SEQ ID NO: 811363 - RNA, 20 nt, Artificial Sequence
  Synthetic
agcagauucauugucuggug

SEQ ID NO: 811364 - RNA, 20 nt, Artificial Sequence
  Synthetic
cuucaauaggucuucuggug

SEQ ID NO: 811365 - RNA, 20 nt, Artificial Sequence
  Synthetic
aauugaugaucaaaguggug

SEQ ID NO: 811366 - RNA, 20 nt, Artificial Sequence
  Synthetic
caagguuauaagcaguggug

SEQ ID NO: 811367 - RNA, 20 nt, Artificial Sequence
  Synthetic
agauaaaucuagcaguggug

SEQ ID NO: 811368 - RNA, 20 nt, Artificial Sequence
  Synthetic
aggagaagacaagaguggug

SEQ ID NO: 811369 - RNA, 20 nt, Artificial Sequence
  Synthetic
cagacuaggguggaguggug

SEQ ID NO: 811370 - RNA, 20 nt, Artificial Sequence
  Synthetic
ugcacuucauauuaguggug

SEQ ID NO: 811371 - RNA, 20 nt, Artificial Sequence
  Synthetic
agguuuggggggacguggug

SEQ ID NO: 811372 - RNA, 20 nt, Artificial Sequence
  Synthetic
cuuaguuugggaagguggug

SEQ ID NO: 811373 - RNA, 20 nt, Artificial Sequence
  Synthetic
ccuaauguuuacagguggug

SEQ ID NO: 811374 - RNA, 20 nt, Artificial Sequence
  Synthetic
cuccuuuuggggugguggug

SEQ ID NO: 811375 - RNA, 20 nt, Artificial Sequence
  Synthetic
uauaauaaugugugguggug

SEQ ID NO: 811376 - RNA, 20 nt, Artificial Sequence
  Synthetic
aauucccaauguugguggug

SEQ ID NO: 811377 - RNA, 20 nt, Artificial Sequence
  Synthetic
ugggagaggugaauguggug

SEQ ID NO: 811378 - RNA, 20 nt, Artificial Sequence
  Synthetic
auaacacucaugauguggug

SEQ ID NO: 811379 - RNA, 20 nt, Artificial Sequence
  Synthetic
acacucuggggacuguggug

SEQ ID NO: 811380 - RNA, 20 nt, Artificial Sequence
  Synthetic
auuuuggaauagguguggug

SEQ ID NO: 811381 - RNA, 20 nt, Artificial Sequence
  Synthetic
ccaaaaugucaguuguggug

SEQ ID NO: 811382 - RNA, 20 nt, Artificial Sequence
  Synthetic
uauuccuaguauuuguggug

SEQ ID NO: 811383 - RNA, 20 nt, Artificial Sequence
  Synthetic
agaaaugauuaagauuggug

SEQ ID NO: 811384 - RNA, 20 nt, Artificial Sequence
  Synthetic
cuaccuucauaaccuuggug

SEQ ID NO: 811385 - RNA, 20 nt, Artificial Sequence
  Synthetic
uuugcaaucagaccuuggug

SEQ ID NO: 811386 - RNA, 20 nt, Artificial Sequence
  Synthetic
cagcaagcaucagcuuggug

SEQ ID NO: 811387 - RNA, 20 nt, Artificial Sequence
  Synthetic
uugauacugugggcuuggug

SEQ ID NO: 811388 - RNA, 20 nt, Artificial Sequence
  Synthetic
uucaagauuggggguuggug

SEQ ID NO: 811389 - RNA, 20 nt, Artificial Sequence
  Synthetic
aaacacaauagauguuggug

SEQ ID NO: 811390 - RNA, 20 nt, Artificial Sequence
  Synthetic
uaagaaguaggaauuuggug

SEQ ID NO: 811391 - RNA, 20 nt, Artificial Sequence
  Synthetic
agaaguuuggacauuuggug

SEQ ID NO: 811392 - RNA, 20 nt, Artificial Sequence
  Synthetic
aaauuaucuuguauuuggug

SEQ ID NO: 811393 - RNA, 20 nt, Artificial Sequence
  Synthetic
aauauugauugacuuuggug

SEQ ID NO: 811394 - RNA, 20 nt, Artificial Sequence
  Synthetic
agaucugccauccuuuggug

SEQ ID NO: 811395 - RNA, 20 nt, Artificial Sequence
  Synthetic
acaaaauggcugcuuuggug

SEQ ID NO: 811396 - RNA, 20 nt, Artificial Sequence
  Synthetic
cacauggcaugauuuuggug

SEQ ID NO: 811397 - RNA, 20 nt, Artificial Sequence
  Synthetic
ccauggcaaaaaaaaaugug

SEQ ID NO: 811398 - RNA, 20 nt, Artificial Sequence
  Synthetic
aauggaaaagucaaaaugug

SEQ ID NO: 811399 - RNA, 20 nt, Artificial Sequence
  Synthetic
cagugcagaaggaaaaugug

SEQ ID NO: 811400 - RNA, 20 nt, Artificial Sequence
  Synthetic
aaaacuucaaggcaaaugug

SEQ ID NO: 811401 - RNA, 20 nt, Artificial Sequence
  Synthetic
uaauuagaaucagaaaugug

SEQ ID NO: 811402 - RNA, 20 nt, Artificial Sequence
  Synthetic
cagugcagaagagaaaugug

SEQ ID NO: 811403 - RNA, 20 nt, Artificial Sequence
  Synthetic
caguguggaagggaaaugug

SEQ ID NO: 811404 - RNA, 20 nt, Artificial Sequence
  Synthetic
acauuauuuuuauaaaugug

SEQ ID NO: 811405 - RNA, 20 nt, Artificial Sequence
  Synthetic
auugaaggauuguaaaugug

SEQ ID NO: 811406 - RNA, 20 nt, Artificial Sequence
  Synthetic
uuuuuuuuuuuuuaaaugug

SEQ ID NO: 811407 - RNA, 20 nt, Artificial Sequence
  Synthetic
ucuggaucagacacaaugug

SEQ ID NO: 811408 - RNA, 20 nt, Artificial Sequence
  Synthetic
acaauaaaaaucacaaugug

SEQ ID NO: 811409 - RNA, 20 nt, Artificial Sequence
  Synthetic
agaauugaugggacaaugug

SEQ ID NO: 811410 - RNA, 20 nt, Artificial Sequence
  Synthetic
ccuggaucuguggcaaugug

SEQ ID NO: 811411 - RNA, 20 nt, Artificial Sequence
  Synthetic
acaaugagucuuucaaugug

SEQ ID NO: 811412 - RNA, 20 nt, Artificial Sequence
  Synthetic
aaaaaaaugauaagaaugug

SEQ ID NO: 811413 - RNA, 20 nt, Artificial Sequence
  Synthetic
caagaugggaucagaaugug

SEQ ID NO: 811414 - RNA, 20 nt, Artificial Sequence
  Synthetic
ucagauugaaugggaaugug

SEQ ID NO: 811415 - RNA, 20 nt, Artificial Sequence
  Synthetic
ucaacaaagacuggaaugug

SEQ ID NO: 811416 - RNA, 20 nt, Artificial Sequence
  Synthetic
uuuaucacaucuggaaugug

SEQ ID NO: 811417 - RNA, 20 nt, Artificial Sequence
  Synthetic
aucugccaaauuggaaugug

SEQ ID NO: 811418 - RNA, 20 nt, Artificial Sequence
  Synthetic
agaaggcagagaugaaugug

SEQ ID NO: 811419 - RNA, 20 nt, Artificial Sequence
  Synthetic
acuucccuguucauaaugug

SEQ ID NO: 811420 - RNA, 20 nt, Artificial Sequence
  Synthetic
uuccuuauauggguaaugug

SEQ ID NO: 811421 - RNA, 20 nt, Artificial Sequence
  Synthetic
ccuacaugugaauuaaugug

SEQ ID NO: 811422 - RNA, 20 nt, Artificial Sequence
  Synthetic
agucucccauuauuaaugug

SEQ ID NO: 811423 - RNA, 20 nt, Artificial Sequence
  Synthetic
agguaaaugcucaacaugug

SEQ ID NO: 811424 - RNA, 20 nt, Artificial Sequence
  Synthetic
uacgaaaaauggcacaugug

SEQ ID NO: 811425 - RNA, 20 nt, Artificial Sequence
  Synthetic
aauuuauuuugucacaugug

SEQ ID NO: 811426 - RNA, 20 nt, Artificial Sequence
  Synthetic
ugcacaguuugggacaugug

SEQ ID NO: 811427 - RNA, 20 nt, Artificial Sequence
  Synthetic
ucucucucccuugacaugug

SEQ ID NO: 811428 - RNA, 20 nt, Artificial Sequence
  Synthetic
aguauuggcuaggccaugug

SEQ ID NO: 811429 - RNA, 20 nt, Artificial Sequence
  Synthetic
aagcagcucugggccaugug

SEQ ID NO: 811430 - RNA, 20 nt, Artificial Sequence
  Synthetic
aaaauaacaaaauccaugug

SEQ ID NO: 811431 - RNA, 20 nt, Artificial Sequence
  Synthetic
auaugauuuuuguccaugug

SEQ ID NO: 811432 - RNA, 20 nt, Artificial Sequence
  Synthetic
cuagcuccuuucagcaugug

SEQ ID NO: 811433 - RNA, 20 nt, Artificial Sequence
  Synthetic
acaaauaccuaaugcaugug

SEQ ID NO: 811434 - RNA, 20 nt, Artificial Sequence
  Synthetic
aaaugucaaagcugcaugug

SEQ ID NO: 811435 - RNA, 20 nt, Artificial Sequence
  Synthetic
ccacaaauaaauaucaugug

SEQ ID NO: 811436 - RNA, 20 nt, Artificial Sequence
  Synthetic
uaauccccaugugucaugug

SEQ ID NO: 811437 - RNA, 20 nt, Artificial Sequence
  Synthetic
ugaaaucauauaaagaugug

SEQ ID NO: 811438 - RNA, 20 nt, Artificial Sequence
  Synthetic
uaguuuacaauuaagaugug

SEQ ID NO: 811439 - RNA, 20 nt, Artificial Sequence
  Synthetic
aaucaaacucaggagaugug

SEQ ID NO: 811440 - RNA, 20 nt, Artificial Sequence
  Synthetic
aauuaaacucaggagaugug

SEQ ID NO: 811441 - RNA, 20 nt, Artificial Sequence
  Synthetic
aucagauaguuguagaugug

SEQ ID NO: 811442 - RNA, 20 nt, Artificial Sequence
  Synthetic
aucagaugguuguagaugug

SEQ ID NO: 811443 - RNA, 20 nt, Artificial Sequence
  Synthetic
uggcuacauggauggaugug

SEQ ID NO: 811444 - RNA, 20 nt, Artificial Sequence
  Synthetic
uagagccucuuauggaugug

SEQ ID NO: 811445 - RNA, 20 nt, Artificial Sequence
  Synthetic
aaaauaguagacgugaugug

SEQ ID NO: 811446 - RNA, 20 nt, Artificial Sequence
  Synthetic
uagauauggauuuugaugug

SEQ ID NO: 811447 - RNA, 20 nt, Artificial Sequence
  Synthetic
acauauugugucaauaugug

SEQ ID NO: 811448 - RNA, 20 nt, Artificial Sequence
  Synthetic
uaucugacacaauauaugug

SEQ ID NO: 811449 - RNA, 20 nt, Artificial Sequence
  Synthetic
auacauaguguauauaugug

SEQ ID NO: 811450 - RNA, 20 nt, Artificial Sequence
  Synthetic
uauauauguguauauaugug

SEQ ID NO: 811451 - RNA, 20 nt, Artificial Sequence
  Synthetic
uuaaucauauuguauaugug

SEQ ID NO: 811452 - RNA, 20 nt, Artificial Sequence
  Synthetic
uauaaauaaccuuauaugug

SEQ ID NO: 811453 - RNA, 20 nt, Artificial Sequence
  Synthetic
aaauauuuaaacacuaugug

SEQ ID NO: 811454 - RNA, 20 nt, Artificial Sequence
  Synthetic
aaauacuuuccaccuaugug

SEQ ID NO: 811455 - RNA, 20 nt, Artificial Sequence
  Synthetic
cccaguggggacucuaugug

SEQ ID NO: 811456 - RNA, 20 nt, Artificial Sequence
  Synthetic
aggggggcacugucuaugug

SEQ ID NO: 811457 - RNA, 20 nt, Artificial Sequence
  Synthetic
cugaauuuacacaguaugug

SEQ ID NO: 811458 - RNA, 20 nt, Artificial Sequence
  Synthetic
ccgcaaaaaaauaguaugug

SEQ ID NO: 811459 - RNA, 20 nt, Artificial Sequence
  Synthetic
aacucuaccauuaguaugug

SEQ ID NO: 811460 - RNA, 20 nt, Artificial Sequence
  Synthetic
augguuuagaaggguaugug

SEQ ID NO: 811461 - RNA, 20 nt, Artificial Sequence
  Synthetic
ccacaaauaaaguguaugug

SEQ ID NO: 811462 - RNA, 20 nt, Artificial Sequence
  Synthetic
aaaaugaaaauguguaugug

SEQ ID NO: 811463 - RNA, 20 nt, Artificial Sequence
  Synthetic
ugcgugaucucacuuaugug

SEQ ID NO: 811464 - RNA, 20 nt, Artificial Sequence
  Synthetic
cugcgugucccucuuaugug

SEQ ID NO: 811465 - RNA, 20 nt, Artificial Sequence
  Synthetic
acaaagaagaggguuaugug

SEQ ID NO: 811466 - RNA, 20 nt, Artificial Sequence
  Synthetic
acauggggagagaaacugug

SEQ ID NO: 811467 - RNA, 20 nt, Artificial Sequence
  Synthetic
aucaacagccacacacugug

SEQ ID NO: 811468 - RNA, 20 nt, Artificial Sequence
  Synthetic
cagaaggggcucacacugug

SEQ ID NO: 811469 - RNA, 20 nt, Artificial Sequence
  Synthetic
acggcuuuguuuacacugug

SEQ ID NO: 811470 - RNA, 20 nt, Artificial Sequence
  Synthetic
cucaugcuccucccacugug

SEQ ID NO: 811471 - RNA, 20 nt, Artificial Sequence
  Synthetic
ucccagguuacuccacugug

SEQ ID NO: 811472 - RNA, 20 nt, Artificial Sequence
  Synthetic
uuacuccauccugcacugug

SEQ ID NO: 811473 - RNA, 20 nt, Artificial Sequence
  Synthetic
aagauuggucuuucacugug

SEQ ID NO: 811474 - RNA, 20 nt, Artificial Sequence
  Synthetic
ccaaauucugagggacugug

SEQ ID NO: 811475 - RNA, 20 nt, Artificial Sequence
  Synthetic
ugcuuuugugaccuacugug

SEQ ID NO: 811476 - RNA, 20 nt, Artificial Sequence
  Synthetic
augcuuacaacauuacugug

SEQ ID NO: 811477 - RNA, 20 nt, Artificial Sequence
  Synthetic
aggaccuaguuauuacugug

SEQ ID NO: 811478 - RNA, 20 nt, Artificial Sequence
  Synthetic
ugcacugcaaaagaccugug

SEQ ID NO: 811479 - RNA, 20 nt, Artificial Sequence
  Synthetic
auuaaaaugauguaccugug

SEQ ID NO: 811480 - RNA, 20 nt, Artificial Sequence
  Synthetic
ugacagagcaagacccugug

SEQ ID NO: 811481 - RNA, 20 nt, Artificial Sequence
  Synthetic
ccuggcagccuuucccugug

SEQ ID NO: 811482 - RNA, 20 nt, Artificial Sequence
  Synthetic
auuggaagaggaagccugug

SEQ ID NO: 811483 - RNA, 20 nt, Artificial Sequence
  Synthetic
uuauuauaauuaagccugug

SEQ ID NO: 811484 - RNA, 20 nt, Artificial Sequence
  Synthetic
cagauuaacuugagccugug

SEQ ID NO: 811485 - RNA, 20 nt, Artificial Sequence
  Synthetic
uauuauuuuauuggccugug

SEQ ID NO: 811486 - RNA, 20 nt, Artificial Sequence
  Synthetic
ucuucagcaagaauccugug

SEQ ID NO: 811487 - RNA, 20 nt, Artificial Sequence
  Synthetic
auuuccugcuuucuccugug

SEQ ID NO: 811488 - RNA, 20 nt, Artificial Sequence
  Synthetic
cuuuggucugcauuccugug

SEQ ID NO: 811489 - RNA, 20 nt, Artificial Sequence
  Synthetic
aauacucucuuuuuccugug

SEQ ID NO: 811490 - RNA, 20 nt, Artificial Sequence
  Synthetic
auacaaggcagaaagcugug

SEQ ID NO: 811491 - RNA, 20 nt, Artificial Sequence
  Synthetic
aacucaaccaccaagcugug

SEQ ID NO: 811492 - RNA, 20 nt, Artificial Sequence
  Synthetic
uugcuugcuuucuagcugug

SEQ ID NO: 811493 - RNA, 20 nt, Artificial Sequence
  Synthetic
cagauaacuauuuagcugug

SEQ ID NO: 811494 - RNA, 20 nt, Artificial Sequence
  Synthetic
acacucuggggacugcugug

SEQ ID NO: 811495 - RNA, 20 nt, Artificial Sequence
  Synthetic
acucucuaucaggugcugug

SEQ ID NO: 811496 - RNA, 20 nt, Artificial Sequence
  Synthetic
agugcccucaaaaaucugug

SEQ ID NO: 811497 - RNA, 20 nt, Artificial Sequence
  Synthetic
agauuugagagucaucugug

SEQ ID NO: 811498 - RNA, 20 nt, Artificial Sequence
  Synthetic
ugaaaacuaagauaucugug

SEQ ID NO: 811499 - RNA, 20 nt, Artificial Sequence
  Synthetic
uccaccacuuucuaucugug

SEQ ID NO: 811500 - RNA, 20 nt, Artificial Sequence
  Synthetic
acugagaguaauuaucugug

SEQ ID NO: 811501 - RNA, 20 nt, Artificial Sequence
  Synthetic
aacaaagggaguuaucugug

SEQ ID NO: 811502 - RNA, 20 nt, Artificial Sequence
  Synthetic
aauuaucauauuacucugug

SEQ ID NO: 811503 - RNA, 20 nt, Artificial Sequence
  Synthetic
caucuugguuaggcucugug

SEQ ID NO: 811504 - RNA, 20 nt, Artificial Sequence
  Synthetic
uuuuuucuuuuuucucugug

SEQ ID NO: 811505 - RNA, 20 nt, Artificial Sequence
  Synthetic
ccggguaauugcauucugug

SEQ ID NO: 811506 - RNA, 20 nt, Artificial Sequence
  Synthetic
caucucuuucugauucugug

SEQ ID NO: 811507 - RNA, 20 nt, Artificial Sequence
  Synthetic
auuuucaggagacuucugug

SEQ ID NO: 811508 - RNA, 20 nt, Artificial Sequence
  Synthetic
caaguagaaacucuucugug

SEQ ID NO: 811509 - RNA, 20 nt, Artificial Sequence
  Synthetic
aguugacucacaguucugug

SEQ ID NO: 811510 - RNA, 20 nt, Artificial Sequence
  Synthetic
uuggauauuuuaguucugug

SEQ ID NO: 811511 - RNA, 20 nt, Artificial Sequence
  Synthetic
agcuugcuaaggguucugug

SEQ ID NO: 811512 - RNA, 20 nt, Artificial Sequence
  Synthetic
acccaugcagugguucugug

SEQ ID NO: 811513 - RNA, 20 nt, Artificial Sequence
  Synthetic
aaguagcaggcauuucugug

SEQ ID NO: 811514 - RNA, 20 nt, Artificial Sequence
  Synthetic
cuucuuuuguacuuucugug

SEQ ID NO: 811515 - RNA, 20 nt, Artificial Sequence
  Synthetic
caugagcuuuucaaagugug

SEQ ID NO: 811516 - RNA, 20 nt, Artificial Sequence
  Synthetic
ugguuuuuuuuuaaagugug

SEQ ID NO: 811517 - RNA, 20 nt, Artificial Sequence
  Synthetic
uauuauaguucuuaagugug

SEQ ID NO: 811518 - RNA, 20 nt, Artificial Sequence
  Synthetic
aucuguuuccccacagugug

SEQ ID NO: 811519 - RNA, 20 nt, Artificial Sequence
  Synthetic
acuauccugaaagcagugug

SEQ ID NO: 811520 - RNA, 20 nt, Artificial Sequence
  Synthetic
uggcccaguaguugagugug

SEQ ID NO: 811521 - RNA, 20 nt, Artificial Sequence
  Synthetic
uaagcacuuagaauagugug

SEQ ID NO: 811522 - RNA, 20 nt, Artificial Sequence
  Synthetic
uaaagaggaagcauagugug

SEQ ID NO: 811523 - RNA, 20 nt, Artificial Sequence
  Synthetic
ucuggcuguuuacacgugug

SEQ ID NO: 811524 - RNA, 20 nt, Artificial Sequence
  Synthetic
uucaagugcuaacgcgugug

SEQ ID NO: 811525 - RNA, 20 nt, Artificial Sequence
  Synthetic
auguaacagaaaaaggugug

SEQ ID NO: 811526 - RNA, 20 nt, Artificial Sequence
  Synthetic
aaguaguuaaaccaggugug

SEQ ID NO: 811527 - RNA, 20 nt, Artificial Sequence
  Synthetic
acaaaaauuagccaggugug

SEQ ID NO: 811528 - RNA, 20 nt, Artificial Sequence
  Synthetic
uuagacaaaugugaggugug

SEQ ID NO: 811529 - RNA, 20 nt, Artificial Sequence
  Synthetic
augaguuaacuguaggugug

SEQ ID NO: 811530 - RNA, 20 nt, Artificial Sequence
  Synthetic
aaauuuucccauugggugug

SEQ ID NO: 811531 - RNA, 20 nt, Artificial Sequence
  Synthetic
uaauuuuuguguauggugug

SEQ ID NO: 811532 - RNA, 20 nt, Artificial Sequence
  Synthetic
uggaagcuuugacuggugug

SEQ ID NO: 811533 - RNA, 20 nt, Artificial Sequence
  Synthetic
agggaacagugucuggugug

SEQ ID NO: 811534 - RNA, 20 nt, Artificial Sequence
  Synthetic
aaaauggcugcuuuggugug

SEQ ID NO: 811535 - RNA, 20 nt, Artificial Sequence
  Synthetic
uuguuguuaagaaaugugug

SEQ ID NO: 811536 - RNA, 20 nt, Artificial Sequence
  Synthetic
uaucacaucuggaaugugug

SEQ ID NO: 811537 - RNA, 20 nt, Artificial Sequence
  Synthetic
ugcaugcaugcccaugugug

SEQ ID NO: 811538 - RNA, 20 nt, Artificial Sequence
  Synthetic
ccagagaggaugcaugugug

SEQ ID NO: 811539 - RNA, 20 nt, Artificial Sequence
  Synthetic
aggugacuggaucaugugug

SEQ ID NO: 811540 - RNA, 20 nt, Artificial Sequence
  Synthetic
cccaaccccaccacugugug

SEQ ID NO: 811541 - RNA, 20 nt, Artificial Sequence
  Synthetic
cagguaaugcagacugugug

SEQ ID NO: 811542 - RNA, 20 nt, Artificial Sequence
  Synthetic
ugcaacaacugaccugugug

SEQ ID NO: 811543 - RNA, 20 nt, Artificial Sequence
  Synthetic
cuaugcucacuaccugugug

SEQ ID NO: 811544 - RNA, 20 nt, Artificial Sequence
  Synthetic
acaugacuuuucccugugug

SEQ ID NO: 811545 - RNA, 20 nt, Artificial Sequence
  Synthetic
uaugccuccaaggcugugug

SEQ ID NO: 811546 - RNA, 20 nt, Artificial Sequence
  Synthetic
aagggaaaacauucugugug

SEQ ID NO: 811547 - RNA, 20 nt, Artificial Sequence
  Synthetic
aguagaaacucuucugugug

SEQ ID NO: 811548 - RNA, 20 nt, Artificial Sequence
  Synthetic
aauguuugcauuucugugug

SEQ ID NO: 811549 - RNA, 20 nt, Artificial Sequence
  Synthetic
aacugauuuuuuucugugug

SEQ ID NO: 811550 - RNA, 20 nt, Artificial Sequence
  Synthetic
acuggauaccugagugugug

SEQ ID NO: 811551 - RNA, 20 nt, Artificial Sequence
  Synthetic
uuaccuaaggugagugugug

SEQ ID NO: 811552 - RNA, 20 nt, Artificial Sequence
  Synthetic
uaaguauaaguaugugugug

SEQ ID NO: 811553 - RNA, 20 nt, Artificial Sequence
  Synthetic
aaaaaaaauguaugugugug

SEQ ID NO: 811554 - RNA, 20 nt, Artificial Sequence
  Synthetic
uaauugcgacugugugugug

SEQ ID NO: 811555 - RNA, 20 nt, Artificial Sequence
  Synthetic
aauaccauggugugugugug

SEQ ID NO: 811556 - RNA, 20 nt, Artificial Sequence
  Synthetic
auggugugugugugugugug

SEQ ID NO: 811557 - RNA, 20 nt, Artificial Sequence
  Synthetic
ugugugugugugugugugug

SEQ ID NO: 811558 - RNA, 20 nt, Artificial Sequence
  Synthetic
uaaauugaucauugugugug

SEQ ID NO: 811559 - RNA, 20 nt, Artificial Sequence
  Synthetic
ucuaaauugaucauugugug

SEQ ID NO: 811560 - RNA, 20 nt, Artificial Sequence
  Synthetic
uugggguaaagacuugugug

SEQ ID NO: 811561 - RNA, 20 nt, Artificial Sequence
  Synthetic
uuuauguaugaccuugugug

SEQ ID NO: 811562 - RNA, 20 nt, Artificial Sequence
  Synthetic
uguuguuuccugcuugugug

SEQ ID NO: 811563 - RNA, 20 nt, Artificial Sequence
  Synthetic
aauuacauguuauuugugug

SEQ ID NO: 811564 - RNA, 20 nt, Artificial Sequence
  Synthetic
auuuuacuccucuuugugug

SEQ ID NO: 811565 - RNA, 20 nt, Artificial Sequence
  Synthetic
agcaccauucuuuuugugug

SEQ ID NO: 811566 - RNA, 20 nt, Artificial Sequence
  Synthetic
cucauacaacagaaauugug

SEQ ID NO: 811567 - RNA, 20 nt, Artificial Sequence
  Synthetic
cugauaaacuauaaauugug

SEQ ID NO: 811568 - RNA, 20 nt, Artificial Sequence
  Synthetic
uaugaaaauauggaauugug

SEQ ID NO: 811569 - RNA, 20 nt, Artificial Sequence
  Synthetic
cuaaucauauaauaauugug

SEQ ID NO: 811570 - RNA, 20 nt, Artificial Sequence
  Synthetic
aauggaaaaccauaauugug

SEQ ID NO: 811571 - RNA, 20 nt, Artificial Sequence
  Synthetic
uagaaaaacuguuaauugug

SEQ ID NO: 811572 - RNA, 20 nt, Artificial Sequence
  Synthetic
aaaauauugcacacauugug

SEQ ID NO: 811573 - RNA, 20 nt, Artificial Sequence
  Synthetic
uugaucgcucuaccauugug

SEQ ID NO: 811574 - RNA, 20 nt, Artificial Sequence
  Synthetic
acaugguauuaagcauugug

SEQ ID NO: 811575 - RNA, 20 nt, Artificial Sequence
  Synthetic
ugcauguuugggucauugug

SEQ ID NO: 811576 - RNA, 20 nt, Artificial Sequence
  Synthetic
auaguuuuauauucauugug

SEQ ID NO: 811577 - RNA, 20 nt, Artificial Sequence
  Synthetic
uacuuaauagguucauugug

SEQ ID NO: 811578 - RNA, 20 nt, Artificial Sequence
  Synthetic
ugccuucugccaagauugug

SEQ ID NO: 811579 - RNA, 20 nt, Artificial Sequence
  Synthetic
ucugugaacaagagauugug

SEQ ID NO: 811580 - RNA, 20 nt, Artificial Sequence
  Synthetic
caauuuaagaugagauugug

SEQ ID NO: 811581 - RNA, 20 nt, Artificial Sequence
  Synthetic
agaaaucauacaggauugug

SEQ ID NO: 811582 - RNA, 20 nt, Artificial Sequence
  Synthetic
cuugacauguggggauugug

SEQ ID NO: 811583 - RNA, 20 nt, Artificial Sequence
  Synthetic
caccuuccaccaugauugug

SEQ ID NO: 811584 - RNA, 20 nt, Artificial Sequence
  Synthetic
cgccuucugccaugauugug

SEQ ID NO: 811585 - RNA, 20 nt, Artificial Sequence
  Synthetic
ugccuucugccaugauugug

SEQ ID NO: 811586 - RNA, 20 nt, Artificial Sequence
  Synthetic
ucaacuucucugauauugug

SEQ ID NO: 811587 - RNA, 20 nt, Artificial Sequence
  Synthetic
ucuuucucugaagacuugug

SEQ ID NO: 811588 - RNA, 20 nt, Artificial Sequence
  Synthetic
uuaccgaaaacagacuugug

SEQ ID NO: 811589 - RNA, 20 nt, Artificial Sequence
  Synthetic
aacuuuauauuguacuugug

SEQ ID NO: 811590 - RNA, 20 nt, Artificial Sequence
  Synthetic
aacugaauaccuuacuugug

SEQ ID NO: 811591 - RNA, 20 nt, Artificial Sequence
  Synthetic
auuuuauguaugaccuugug

SEQ ID NO: 811592 - RNA, 20 nt, Artificial Sequence
  Synthetic
cuuggaccugcugccuugug

SEQ ID NO: 811593 - RNA, 20 nt, Artificial Sequence
  Synthetic
agcuuugugauugccuugug

SEQ ID NO: 811594 - RNA, 20 nt, Artificial Sequence
  Synthetic
aaacauggaacauccuugug

SEQ ID NO: 811595 - RNA, 20 nt, Artificial Sequence
  Synthetic
uuuucuauaaggagcuugug

SEQ ID NO: 811596 - RNA, 20 nt, Artificial Sequence
  Synthetic
ucugguggaugaggcuugug

SEQ ID NO: 811597 - RNA, 20 nt, Artificial Sequence
  Synthetic
uuuguauucugaggcuugug

SEQ ID NO: 811598 - RNA, 20 nt, Artificial Sequence
  Synthetic
acuguuguuuccugcuugug

SEQ ID NO: 811599 - RNA, 20 nt, Artificial Sequence
  Synthetic
accacagggaauugcuugug

SEQ ID NO: 811600 - RNA, 20 nt, Artificial Sequence
  Synthetic
aaaauauugaagcucuugug

SEQ ID NO: 811601 - RNA, 20 nt, Artificial Sequence
  Synthetic
uugaguuuggagcucuugug

SEQ ID NO: 811602 - RNA, 20 nt, Artificial Sequence
  Synthetic
aaccucuuuuuucucuugug

SEQ ID NO: 811603 - RNA, 20 nt, Artificial Sequence
  Synthetic
uucagaccuuuggucuugug

SEQ ID NO: 811604 - RNA, 20 nt, Artificial Sequence
  Synthetic
acuguugcuuuggucuugug

SEQ ID NO: 811605 - RNA, 20 nt, Artificial Sequence
  Synthetic
ucccacuggaaugucuugug

SEQ ID NO: 811606 - RNA, 20 nt, Artificial Sequence
  Synthetic
caagauggcaaacaguugug

SEQ ID NO: 811607 - RNA, 20 nt, Artificial Sequence
  Synthetic
ugguugaugggagaguugug

SEQ ID NO: 811608 - RNA, 20 nt, Artificial Sequence
  Synthetic
ugccuggugccauaguugug

SEQ ID NO: 811609 - RNA, 20 nt, Artificial Sequence
  Synthetic
ccagggucaggguaguugug

SEQ ID NO: 811610 - RNA, 20 nt, Artificial Sequence
  Synthetic
ucaguuuccauguaguugug

SEQ ID NO: 811611 - RNA, 20 nt, Artificial Sequence
  Synthetic
uugaaacauagaucguugug

SEQ ID NO: 811612 - RNA, 20 nt, Artificial Sequence
  Synthetic
cuauucacugggagguugug

SEQ ID NO: 811613 - RNA, 20 nt, Artificial Sequence
  Synthetic
uggcaggguuggggguugug

SEQ ID NO: 811614 - RNA, 20 nt, Artificial Sequence
  Synthetic
caggggcgggugggguugug

SEQ ID NO: 811615 - RNA, 20 nt, Artificial Sequence
  Synthetic
uggucauccucaugguugug

SEQ ID NO: 811616 - RNA, 20 nt, Artificial Sequence
  Synthetic
acacccugggaacuguugug

SEQ ID NO: 811617 - RNA, 20 nt, Artificial Sequence
  Synthetic
acacucuggggacuguugug

SEQ ID NO: 811618 - RNA, 20 nt, Artificial Sequence
  Synthetic
acacaccagggccuguugug

SEQ ID NO: 811619 - RNA, 20 nt, Artificial Sequence
  Synthetic
acacaccggggccuguugug

SEQ ID NO: 811620 - RNA, 20 nt, Artificial Sequence
  Synthetic
aaacauuuuagaguguugug

SEQ ID NO: 811621 - RNA, 20 nt, Artificial Sequence
  Synthetic
uaccucuucagguuguugug

SEQ ID NO: 811622 - RNA, 20 nt, Artificial Sequence
  Synthetic
ccaaauaauucuuuguugug

SEQ ID NO: 811623 - RNA, 20 nt, Artificial Sequence
  Synthetic
cuauuuucuucaaauuugug

SEQ ID NO: 811624 - RNA, 20 nt, Artificial Sequence
  Synthetic
cuuaggccuuuaaauuugug

SEQ ID NO: 811625 - RNA, 20 nt, Artificial Sequence
  Synthetic
uccucauugcaauauuugug

SEQ ID NO: 811626 - RNA, 20 nt, Artificial Sequence
  Synthetic
auuguacauauuuauuugug

SEQ ID NO: 811627 - RNA, 20 nt, Artificial Sequence
  Synthetic
augagauggcaaacuuugug

SEQ ID NO: 811628 - RNA, 20 nt, Artificial Sequence
  Synthetic
aagggguaguaagcuuugug

SEQ ID NO: 811629 - RNA, 20 nt, Artificial Sequence
  Synthetic
uuuagaucuuaagcuuugug

SEQ ID NO: 811630 - RNA, 20 nt, Artificial Sequence
  Synthetic
uuuaaaaaaauggcuuugug

SEQ ID NO: 811631 - RNA, 20 nt, Artificial Sequence
  Synthetic
cuaugugcuugugcuuugug

SEQ ID NO: 811632 - RNA, 20 nt, Artificial Sequence
  Synthetic
aaauuuuacuccucuuugug

SEQ ID NO: 811633 - RNA, 20 nt, Artificial Sequence
  Synthetic
uguaaucccagcucuuugug

SEQ ID NO: 811634 - RNA, 20 nt, Artificial Sequence
  Synthetic
acuuuuauuuuagguuugug

SEQ ID NO: 811635 - RNA, 20 nt, Artificial Sequence
  Synthetic
uuccugcuugaaauuuugug

SEQ ID NO: 811636 - RNA, 20 nt, Artificial Sequence
  Synthetic
uccuguacauaaauuuugug

SEQ ID NO: 811637 - RNA, 20 nt, Artificial Sequence
  Synthetic
auuaacuaaaucauuuugug

SEQ ID NO: 811638 - RNA, 20 nt, Artificial Sequence
  Synthetic
uggacaauacuuauuuugug

SEQ ID NO: 811639 - RNA, 20 nt, Artificial Sequence
  Synthetic
cugcagcuauuuauuuugug

SEQ ID NO: 811640 - RNA, 20 nt, Artificial Sequence
  Synthetic
aaugauaucagacuuuugug

SEQ ID NO: 811641 - RNA, 20 nt, Artificial Sequence
  Synthetic
uuccucgcagagcuuuugug

SEQ ID NO: 811642 - RNA, 20 nt, Artificial Sequence
  Synthetic
uuaaacaucugucuuuugug

SEQ ID NO: 811643 - RNA, 20 nt, Artificial Sequence
  Synthetic
uuacaaucacuaguuuugug

SEQ ID NO: 811644 - RNA, 20 nt, Artificial Sequence
  Synthetic
accuucacgguaguuuugug

SEQ ID NO: 811645 - RNA, 20 nt, Artificial Sequence
  Synthetic
aauacugcccagguuuugug

SEQ ID NO: 811646 - RNA, 20 nt, Artificial Sequence
  Synthetic
ugugguuuauagguuuugug

SEQ ID NO: 811647 - RNA, 20 nt, Artificial Sequence
  Synthetic
uuugacauccugguuuugug

SEQ ID NO: 811648 - RNA, 20 nt, Artificial Sequence
  Synthetic
aacacaaagcguguuuugug

SEQ ID NO: 811649 - RNA, 20 nt, Artificial Sequence
  Synthetic
agaggcaucaacuuuuugug

SEQ ID NO: 811650 - RNA, 20 nt, Artificial Sequence
  Synthetic
cuucagaugggguuuuugug

SEQ ID NO: 811651 - RNA, 20 nt, Artificial Sequence
  Synthetic
aaaaagaaaaaaaaaaauug

SEQ ID NO: 811652 - RNA, 20 nt, Artificial Sequence
  Synthetic
aguaaaaggaaaaaaaauug

SEQ ID NO: 811653 - RNA, 20 nt, Artificial Sequence
  Synthetic
auaauuuaugcaaaaaauug

SEQ ID NO: 811654 - RNA, 20 nt, Artificial Sequence
  Synthetic
aauuaauacugaaaaaauug

SEQ ID NO: 811655 - RNA, 20 nt, Artificial Sequence
  Synthetic
auuaacuccaugaaaaauug

SEQ ID NO: 811656 - RNA, 20 nt, Artificial Sequence
  Synthetic
auuagacuuacagaaaauug

SEQ ID NO: 811657 - RNA, 20 nt, Artificial Sequence
  Synthetic
aacauauaaucagaaaauug

SEQ ID NO: 811658 - RNA, 20 nt, Artificial Sequence
  Synthetic
uuuuacuuaugagaaaauug

SEQ ID NO: 811659 - RNA, 20 nt, Artificial Sequence
  Synthetic
caacguacaguugaaaauug

SEQ ID NO: 811660 - RNA, 20 nt, Artificial Sequence
  Synthetic
uucuuaagccacuaaaauug

SEQ ID NO: 811661 - RNA, 20 nt, Artificial Sequence
  Synthetic
aaaugacucuacuaaaauug

SEQ ID NO: 811662 - RNA, 20 nt, Artificial Sequence
  Synthetic
uugaaagauggcuaaaauug

SEQ ID NO: 811663 - RNA, 20 nt, Artificial Sequence
  Synthetic
ugauaguauccuuaaaauug

SEQ ID NO: 811664 - RNA, 20 nt, Artificial Sequence
  Synthetic
uccaaaaaauugacaaauug

SEQ ID NO: 811665 - RNA, 20 nt, Artificial Sequence
  Synthetic
uuucucuauacuacaaauug

SEQ ID NO: 811666 - RNA, 20 nt, Artificial Sequence
  Synthetic
auguugagaauuacaaauug

SEQ ID NO: 811667 - RNA, 20 nt, Artificial Sequence
  Synthetic
uucagaguucuaccaaauug

SEQ ID NO: 811668 - RNA, 20 nt, Artificial Sequence
  Synthetic
cuucaagucuggucaaauug

SEQ ID NO: 811669 - RNA, 20 nt, Artificial Sequence
  Synthetic
uaauugcuuaguucaaauug

SEQ ID NO: 811670 - RNA, 20 nt, Artificial Sequence
  Synthetic
augaacgguuaaagaaauug

SEQ ID NO: 811671 - RNA, 20 nt, Artificial Sequence
  Synthetic
ccacauucaacaagaaauug

SEQ ID NO: 811672 - RNA, 20 nt, Artificial Sequence
  Synthetic
uuuauccccugcagaaauug

SEQ ID NO: 811673 - RNA, 20 nt, Artificial Sequence
  Synthetic
aagaggcauccuagaaauug

SEQ ID NO: 811674 - RNA, 20 nt, Artificial Sequence
  Synthetic
aguuaucacucaugaaauug

SEQ ID NO: 811675 - RNA, 20 nt, Artificial Sequence
  Synthetic
aauaacaggagcugaaauug

SEQ ID NO: 811676 - RNA, 20 nt, Artificial Sequence
  Synthetic
aauaacaggcucugaaauug

SEQ ID NO: 811677 - RNA, 20 nt, Artificial Sequence
  Synthetic
aauaacaaguucugaaauug

SEQ ID NO: 811678 - RNA, 20 nt, Artificial Sequence
  Synthetic
aauaacgaguucugaaauug

SEQ ID NO: 811679 - RNA, 20 nt, Artificial Sequence
  Synthetic
uucgucucugugugaaauug

SEQ ID NO: 811680 - RNA, 20 nt, Artificial Sequence
  Synthetic
ugaaucucugcuugaaauug

SEQ ID NO: 811681 - RNA, 20 nt, Artificial Sequence
  Synthetic
aggucuuuuauuugaaauug

SEQ ID NO: 811682 - RNA, 20 nt, Artificial Sequence
  Synthetic
ccagucuuaguuauaaauug

SEQ ID NO: 811683 - RNA, 20 nt, Artificial Sequence
  Synthetic
agacuagaaagaguaaauug

SEQ ID NO: 811684 - RNA, 20 nt, Artificial Sequence
  Synthetic
aauucucaaaguguaaauug

SEQ ID NO: 811685 - RNA, 20 nt, Artificial Sequence
  Synthetic
aaauaaugugguguaaauug

SEQ ID NO: 811686 - RNA, 20 nt, Artificial Sequence
  Synthetic
acucauauugcauuaaauug

SEQ ID NO: 811687 - RNA, 20 nt, Artificial Sequence
  Synthetic
ucaggggagucauuaaauug

SEQ ID NO: 811688 - RNA, 20 nt, Artificial Sequence
  Synthetic
uugaaugaucuauuaaauug

SEQ ID NO: 811689 - RNA, 20 nt, Artificial Sequence
  Synthetic
uuuuccacagaguuaaauug

SEQ ID NO: 811690 - RNA, 20 nt, Artificial Sequence
  Synthetic
uccuaagguagcuacaauug

SEQ ID NO: 811691 - RNA, 20 nt, Artificial Sequence
  Synthetic
aaaaaaaaaguauccaauug

SEQ ID NO: 811692 - RNA, 20 nt, Artificial Sequence
  Synthetic
ucugaccuuagaaucaauug

SEQ ID NO: 811693 - RNA, 20 nt, Artificial Sequence
  Synthetic
uagagucuguagaucaauug

SEQ ID NO: 811694 - RNA, 20 nt, Artificial Sequence
  Synthetic
accacagcagugcucaauug

SEQ ID NO: 811695 - RNA, 20 nt, Artificial Sequence
  Synthetic
aaggaacaggaagucaauug

SEQ ID NO: 811696 - RNA, 20 nt, Artificial Sequence
  Synthetic
aaagauguaaaauucaauug

SEQ ID NO: 811697 - RNA, 20 nt, Artificial Sequence
  Synthetic
aaaacaaaccuuuucaauug

SEQ ID NO: 811698 - RNA, 20 nt, Artificial Sequence
  Synthetic
auuuaaaaaagaaagaauug

SEQ ID NO: 811699 - RNA, 20 nt, Artificial Sequence
  Synthetic
cagggagagguaaagaauug

SEQ ID NO: 811700 - RNA, 20 nt, Artificial Sequence
  Synthetic
uggacagaagucaagaauug

SEQ ID NO: 811701 - RNA, 20 nt, Artificial Sequence
  Synthetic
cuaccccaagggaagaauug

SEQ ID NO: 811702 - RNA, 20 nt, Artificial Sequence
  Synthetic
augaaaagauaagagaauug

SEQ ID NO: 811703 - RNA, 20 nt, Artificial Sequence
  Synthetic
ucacagaaggauaggaauug

SEQ ID NO: 811704 - RNA, 20 nt, Artificial Sequence
  Synthetic
uauuauggauguaggaauug

SEQ ID NO: 811705 - RNA, 20 nt, Artificial Sequence
  Synthetic
ugcugcauuguggggaauug

SEQ ID NO: 811706 - RNA, 20 nt, Artificial Sequence
  Synthetic
accucuuuucugcugaauug

SEQ ID NO: 811707 - RNA, 20 nt, Artificial Sequence
  Synthetic
ccaaaagaccauuugaauug

SEQ ID NO: 811708 - RNA, 20 nt, Artificial Sequence
  Synthetic
cuaauggaaaaccauaauug

SEQ ID NO: 811709 - RNA, 20 nt, Artificial Sequence
  Synthetic
auagaaagguaucauaauug

SEQ ID NO: 811710 - RNA, 20 nt, Artificial Sequence
  Synthetic
uugcaauagccuacuaauug

SEQ ID NO: 811711 - RNA, 20 nt, Artificial Sequence
  Synthetic
ugacuuuuacaaccuaauug

SEQ ID NO: 811712 - RNA, 20 nt, Artificial Sequence
  Synthetic
cagucuuacaagucuaauug

SEQ ID NO: 811713 - RNA, 20 nt, Artificial Sequence
  Synthetic
uacccuuaagcuucuaauug

SEQ ID NO: 811714 - RNA, 20 nt, Artificial Sequence
  Synthetic
cuuccauccucuucuaauug

SEQ ID NO: 811715 - RNA, 20 nt, Artificial Sequence
  Synthetic
ugaaaaaaaaucaguaauug

SEQ ID NO: 811716 - RNA, 20 nt, Artificial Sequence
  Synthetic
cuuaauaaauauaguaauug

SEQ ID NO: 811717 - RNA, 20 nt, Artificial Sequence
  Synthetic
uuuuacaggugagguaauug

SEQ ID NO: 811718 - RNA, 20 nt, Artificial Sequence
  Synthetic
agaaaacacacuauuaauug

SEQ ID NO: 811719 - RNA, 20 nt, Artificial Sequence
  Synthetic
uuuagcuguugacuuaauug

SEQ ID NO: 811720 - RNA, 20 nt, Artificial Sequence
  Synthetic
uuguuuuuauuucuuaauug

SEQ ID NO: 811721 - RNA, 20 nt, Artificial Sequence
  Synthetic
uuaguuuuaaucuuuaauug

SEQ ID NO: 811722 - RNA, 20 nt, Artificial Sequence
  Synthetic
aguaaauuuuauuuuaauug

SEQ ID NO: 811723 - RNA, 20 nt, Artificial Sequence
  Synthetic
cagucugugucuuuuaauug

SEQ ID NO: 811724 - RNA, 20 nt, Artificial Sequence
  Synthetic
uggauaugucguuuuaauug

SEQ ID NO: 811725 - RNA, 20 nt, Artificial Sequence
  Synthetic
uugaaacuauuuuuuaauug

SEQ ID NO: 811726 - RNA, 20 nt, Artificial Sequence
  Synthetic
cauggggucauaaaacauug

SEQ ID NO: 811727 - RNA, 20 nt, Artificial Sequence
  Synthetic
auauugugaaauaaacauug

SEQ ID NO: 811728 - RNA, 20 nt, Artificial Sequence
  Synthetic
aggccccaccuccaacauug

SEQ ID NO: 811729 - RNA, 20 nt, Artificial Sequence
  Synthetic
cuaaaauauugcacacauug

SEQ ID NO: 811730 - RNA, 20 nt, Artificial Sequence
  Synthetic
aaagagcugaacccacauug

SEQ ID NO: 811731 - RNA, 20 nt, Artificial Sequence
  Synthetic
aauguguaacagucacauug

SEQ ID NO: 811732 - RNA, 20 nt, Artificial Sequence
  Synthetic
aauucuugguugucacauug

SEQ ID NO: 811733 - RNA, 20 nt, Artificial Sequence
  Synthetic
ccaauauggcuaagacauug

SEQ ID NO: 811734 - RNA, 20 nt, Artificial Sequence
  Synthetic
uuuucuacaaauagacauug

SEQ ID NO: 811735 - RNA, 20 nt, Artificial Sequence
  Synthetic
uauguuagaauuugacauug

SEQ ID NO: 811736 - RNA, 20 nt, Artificial Sequence
  Synthetic
uaugacugaaaaauacauug

SEQ ID NO: 811737 - RNA, 20 nt, Artificial Sequence
  Synthetic
uuugauauacccauacauug

SEQ ID NO: 811738 - RNA, 20 nt, Artificial Sequence
  Synthetic
uaagucucuaggauacauug

SEQ ID NO: 811739 - RNA, 20 nt, Artificial Sequence
  Synthetic
aguaacaaucauauacauug

SEQ ID NO: 811740 - RNA, 20 nt, Artificial Sequence
  Synthetic
caauccauauauauacauug

SEQ ID NO: 811741 - RNA, 20 nt, Artificial Sequence
  Synthetic
auacacaaaucacuacauug

SEQ ID NO: 811742 - RNA, 20 nt, Artificial Sequence
  Synthetic
auacaaccuuuauuacauug

SEQ ID NO: 811743 - RNA, 20 nt, Artificial Sequence
  Synthetic
uuugauauauguuuacauug

SEQ ID NO: 811744 - RNA, 20 nt, Artificial Sequence
  Synthetic
uuuuuuugccuuuuacauug

SEQ ID NO: 811745 - RNA, 20 nt, Artificial Sequence
  Synthetic
agucaaauggcaaaccauug

SEQ ID NO: 811746 - RNA, 20 nt, Artificial Sequence
  Synthetic
uaaugagcaaagaaccauug

SEQ ID NO: 811747 - RNA, 20 nt, Artificial Sequence
  Synthetic
cuuggcaagccucaccauug

SEQ ID NO: 811748 - RNA, 20 nt, Artificial Sequence
  Synthetic
aauuucgaaacagaccauug

SEQ ID NO: 811749 - RNA, 20 nt, Artificial Sequence
  Synthetic
uguugaucgcucuaccauug

SEQ ID NO: 811750 - RNA, 20 nt, Artificial Sequence
  Synthetic
aaagaaaacucuuaccauug

SEQ ID NO: 811751 - RNA, 20 nt, Artificial Sequence
  Synthetic
ucauaggaguaaagccauug

SEQ ID NO: 811752 - RNA, 20 nt, Artificial Sequence
  Synthetic
aauuaaauguuaagccauug

SEQ ID NO: 811753 - RNA, 20 nt, Artificial Sequence
  Synthetic
ccaccuccaaauauccauug

SEQ ID NO: 811754 - RNA, 20 nt, Artificial Sequence
  Synthetic
caacaauauucacuccauug

SEQ ID NO: 811755 - RNA, 20 nt, Artificial Sequence
  Synthetic
auaaugccucuucuccauug

SEQ ID NO: 811756 - RNA, 20 nt, Artificial Sequence
  Synthetic
uuucuagucucauuccauug

SEQ ID NO: 811757 - RNA, 20 nt, Artificial Sequence
  Synthetic
cuuaauucauaguuccauug

SEQ ID NO: 811758 - RNA, 20 nt, Artificial Sequence
  Synthetic
accaauuuccauuuccauug

SEQ ID NO: 811759 - RNA, 20 nt, Artificial Sequence
  Synthetic
agugcacucccaaagcauug

SEQ ID NO: 811760 - RNA, 20 nt, Artificial Sequence
  Synthetic
auacuguuaaugaagcauug

SEQ ID NO: 811761 - RNA, 20 nt, Artificial Sequence
  Synthetic
cucaguugaaaagagcauug

SEQ ID NO: 811762 - RNA, 20 nt, Artificial Sequence
  Synthetic
ucuugcuaaaagaggcauug

SEQ ID NO: 811763 - RNA, 20 nt, Artificial Sequence
  Synthetic
uaaaucagauuggggcauug

SEQ ID NO: 811764 - RNA, 20 nt, Artificial Sequence
  Synthetic
uuucuccuuuaaaugcauug

SEQ ID NO: 811765 - RNA, 20 nt, Artificial Sequence
  Synthetic
uauacaacaaauaugcauug

SEQ ID NO: 811766 - RNA, 20 nt, Artificial Sequence
  Synthetic
agcuugaaauaugugcauug

SEQ ID NO: 811767 - RNA, 20 nt, Artificial Sequence
  Synthetic
cucaacaucacuaaucauug

SEQ ID NO: 811768 - RNA, 20 nt, Artificial Sequence
  Synthetic
uuuauuaugcuugaucauug

SEQ ID NO: 811769 - RNA, 20 nt, Artificial Sequence
  Synthetic
cgugagguaguauaucauug

SEQ ID NO: 811770 - RNA, 20 nt, Artificial Sequence
  Synthetic
aauaaguaugcuuaucauug

SEQ ID NO: 811771 - RNA, 20 nt, Artificial Sequence
  Synthetic
ugugagguaauaucucauug

SEQ ID NO: 811772 - RNA, 20 nt, Artificial Sequence
  Synthetic
aaugagaugauaucucauug

SEQ ID NO: 811773 - RNA, 20 nt, Artificial Sequence
  Synthetic
agugagaugguaucucauug

SEQ ID NO: 811774 - RNA, 20 nt, Artificial Sequence
  Synthetic
ugugagaugguaucucauug

SEQ ID NO: 811775 - RNA, 20 nt, Artificial Sequence
  Synthetic
aagcuguugggaagucauug

SEQ ID NO: 811776 - RNA, 20 nt, Artificial Sequence
  Synthetic
cauuagaauacaauucauug

SEQ ID NO: 811777 - RNA, 20 nt, Artificial Sequence
  Synthetic
ucuaaagguuauauucauug

SEQ ID NO: 811778 - RNA, 20 nt, Artificial Sequence
  Synthetic
aaccuguagcaacuucauug

SEQ ID NO: 811779 - RNA, 20 nt, Artificial Sequence
  Synthetic
caagucagagaccuucauug

SEQ ID NO: 811780 - RNA, 20 nt, Artificial Sequence
  Synthetic
ugagaagugucuguucauug

SEQ ID NO: 811781 - RNA, 20 nt, Artificial Sequence
  Synthetic
uuuuggaaacaauuucauug

SEQ ID NO: 811782 - RNA, 20 nt, Artificial Sequence
  Synthetic
aauugguauggguuucauug

SEQ ID NO: 811783 - RNA, 20 nt, Artificial Sequence
  Synthetic
uuauggaugagcaaagauug

SEQ ID NO: 811784 - RNA, 20 nt, Artificial Sequence
  Synthetic
aauuccugcuuucaagauug

SEQ ID NO: 811785 - RNA, 20 nt, Artificial Sequence
  Synthetic
aauugucgauuuuaagauug

SEQ ID NO: 811786 - RNA, 20 nt, Artificial Sequence
  Synthetic
acauguacaaaaccagauug

SEQ ID NO: 811787 - RNA, 20 nt, Artificial Sequence
  Synthetic
cugccuccuucaccagauug

SEQ ID NO: 811788 - RNA, 20 nt, Artificial Sequence
  Synthetic
aaaaacugaagaccagauug

SEQ ID NO: 811789 - RNA, 20 nt, Artificial Sequence
  Synthetic
caggaacuuucuccagauug

SEQ ID NO: 811790 - RNA, 20 nt, Artificial Sequence
  Synthetic
aguaagaccuuuccagauug

SEQ ID NO: 811791 - RNA, 20 nt, Artificial Sequence
  Synthetic
aacagaagacuagcagauug

SEQ ID NO: 811792 - RNA, 20 nt, Artificial Sequence
  Synthetic
cugguagggguagcagauug

SEQ ID NO: 811793 - RNA, 20 nt, Artificial Sequence
  Synthetic
caauaggauaaaagagauug

SEQ ID NO: 811794 - RNA, 20 nt, Artificial Sequence
  Synthetic
ucuggaaaugauagagauug

SEQ ID NO: 811795 - RNA, 20 nt, Artificial Sequence
  Synthetic
cugcuuuuacaaggagauug

SEQ ID NO: 811796 - RNA, 20 nt, Artificial Sequence
  Synthetic
uacaauuuaagaugagauug

SEQ ID NO: 811797 - RNA, 20 nt, Artificial Sequence
  Synthetic
cauaaauaccucugagauug

SEQ ID NO: 811798 - RNA, 20 nt, Artificial Sequence
  Synthetic
ugggaugcugaaauagauug

SEQ ID NO: 811799 - RNA, 20 nt, Artificial Sequence
  Synthetic
uagguuuauggcauagauug

SEQ ID NO: 811800 - RNA, 20 nt, Artificial Sequence
  Synthetic
aauaguaaccucauagauug

SEQ ID NO: 811801 - RNA, 20 nt, Artificial Sequence
  Synthetic
uggccugccuuacuagauug

SEQ ID NO: 811802 - RNA, 20 nt, Artificial Sequence
  Synthetic
aaugccuccucuguagauug

SEQ ID NO: 811803 - RNA, 20 nt, Artificial Sequence
  Synthetic
cuagggaugugaaaggauug

SEQ ID NO: 811804 - RNA, 20 nt, Artificial Sequence
  Synthetic
aauuaaaaaugcaaggauug

SEQ ID NO: 811805 - RNA, 20 nt, Artificial Sequence
  Synthetic
uaggaggugauuaaggauug

SEQ ID NO: 811806 - RNA, 20 nt, Artificial Sequence
  Synthetic
aaucaguaauuuuaggauug

SEQ ID NO: 811807 - RNA, 20 nt, Artificial Sequence
  Synthetic
acuuuucuguuuuaggauug

SEQ ID NO: 811808 - RNA, 20 nt, Artificial Sequence
  Synthetic
acacaccaguugggggauug

SEQ ID NO: 811809 - RNA, 20 nt, Artificial Sequence
  Synthetic
cccuugacauguggggauug

SEQ ID NO: 811810 - RNA, 20 nt, Artificial Sequence
  Synthetic
aaagauggucgcuuggauug

SEQ ID NO: 811811 - RNA, 20 nt, Artificial Sequence
  Synthetic
ucauugcuuuugaaugauug

SEQ ID NO: 811812 - RNA, 20 nt, Artificial Sequence
  Synthetic
uuaaucauugcuaaugauug

SEQ ID NO: 811813 - RNA, 20 nt, Artificial Sequence
  Synthetic
augaagaaaauucaugauug

SEQ ID NO: 811814 - RNA, 20 nt, Artificial Sequence
  Synthetic
uaaauaaaaauagaugauug

SEQ ID NO: 811815 - RNA, 20 nt, Artificial Sequence
  Synthetic
ccauuugcaaaugaugauug

SEQ ID NO: 811816 - RNA, 20 nt, Artificial Sequence
  Synthetic
cacauguauauuacugauug

SEQ ID NO: 811817 - RNA, 20 nt, Artificial Sequence
  Synthetic
ucccaauugcaaccugauug

SEQ ID NO: 811818 - RNA, 20 nt, Artificial Sequence
  Synthetic
uuagguagaaaaagugauug

SEQ ID NO: 811819 - RNA, 20 nt, Artificial Sequence
  Synthetic
uuucuuuucauaagugauug

SEQ ID NO: 811820 - RNA, 20 nt, Artificial Sequence
  Synthetic
auuuguuggaugagugauug

SEQ ID NO: 811821 - RNA, 20 nt, Artificial Sequence
  Synthetic
aaauuagccacgcgugauug

SEQ ID NO: 811822 - RNA, 20 nt, Artificial Sequence
  Synthetic
acuauuaaauugauugauug

SEQ ID NO: 811823 - RNA, 20 nt, Artificial Sequence
  Synthetic
augaauauagguauugauug

SEQ ID NO: 811824 - RNA, 20 nt, Artificial Sequence
  Synthetic
aguauucuauuucuugauug

SEQ ID NO: 811825 - RNA, 20 nt, Artificial Sequence
  Synthetic
uucauguugcagguugauug

SEQ ID NO: 811826 - RNA, 20 nt, Artificial Sequence
  Synthetic
uguauuaauuaauuugauug

SEQ ID NO: 811827 - RNA, 20 nt, Artificial Sequence
  Synthetic
aggaggccaugcaaauauug

SEQ ID NO: 811828 - RNA, 20 nt, Artificial Sequence
  Synthetic
uggaaacuuaauaaauauug

SEQ ID NO: 811829 - RNA, 20 nt, Artificial Sequence
  Synthetic
uaggaauaguauaaauauug

SEQ ID NO: 811830 - RNA, 20 nt, Artificial Sequence
  Synthetic
acugagauugcuaaauauug

SEQ ID NO: 811831 - RNA, 20 nt, Artificial Sequence
  Synthetic
aagccccaccuccaauauug

SEQ ID NO: 811832 - RNA, 20 nt, Artificial Sequence
  Synthetic
uuucuuucucugcaauauug

SEQ ID NO: 811833 - RNA, 20 nt, Artificial Sequence
  Synthetic
ugcuaaaaaugugaauauug

SEQ ID NO: 811834 - RNA, 20 nt, Artificial Sequence
  Synthetic
uacaagaacagcuaauauug

SEQ ID NO: 811835 - RNA, 20 nt, Artificial Sequence
  Synthetic
ucucuuuuuagcuaauauug

SEQ ID NO: 811836 - RNA, 20 nt, Artificial Sequence
  Synthetic
cacggaauaaacacauauug

SEQ ID NO: 811837 - RNA, 20 nt, Artificial Sequence
  Synthetic
uguuuugugggcacauauug

SEQ ID NO: 811838 - RNA, 20 nt, Artificial Sequence
  Synthetic
aauaccaagcugccauauug

SEQ ID NO: 811839 - RNA, 20 nt, Artificial Sequence
  Synthetic
auucagugauauccauauug

SEQ ID NO: 811840 - RNA, 20 nt, Artificial Sequence
  Synthetic
cagaccccaugagcauauug

SEQ ID NO: 811841 - RNA, 20 nt, Artificial Sequence
  Synthetic
ucaaagggguaugcauauug

SEQ ID NO: 811842 - RNA, 20 nt, Artificial Sequence
  Synthetic
cagggcuucuuuagauauug

SEQ ID NO: 811843 - RNA, 20 nt, Artificial Sequence
  Synthetic
cuugaaggcaagauauauug

SEQ ID NO: 811844 - RNA, 20 nt, Artificial Sequence
  Synthetic
uuaaagcagaugauauauug

SEQ ID NO: 811845 - RNA, 20 nt, Artificial Sequence
  Synthetic
aagguauagcugcuauauug

SEQ ID NO: 811846 - RNA, 20 nt, Artificial Sequence
  Synthetic
auacagccaacuguauauug

SEQ ID NO: 811847 - RNA, 20 nt, Artificial Sequence
  Synthetic
ugaagaaagccauuauauug

SEQ ID NO: 811848 - RNA, 20 nt, Artificial Sequence
  Synthetic
uguaagacuggcuuauauug

SEQ ID NO: 811849 - RNA, 20 nt, Artificial Sequence
  Synthetic
ugauuucuaauuuuauauug

SEQ ID NO: 811850 - RNA, 20 nt, Artificial Sequence
  Synthetic
uugcagacugucaacuauug

SEQ ID NO: 811851 - RNA, 20 nt, Artificial Sequence
  Synthetic
aauccauuuuagaacuauug

SEQ ID NO: 811852 - RNA, 20 nt, Artificial Sequence
  Synthetic
aaauguccuguguacuauug

SEQ ID NO: 811853 - RNA, 20 nt, Artificial Sequence
  Synthetic
agaagaauaggugccuauug

SEQ ID NO: 811854 - RNA, 20 nt, Artificial Sequence
  Synthetic
aguggucccugugccuauug

SEQ ID NO: 811855 - RNA, 20 nt, Artificial Sequence
  Synthetic
acuacuuaacaccgcuauug

SEQ ID NO: 811856 - RNA, 20 nt, Artificial Sequence
  Synthetic
auuuuaauuauaaucuauug

SEQ ID NO: 811857 - RNA, 20 nt, Artificial Sequence
  Synthetic
aggacaggguggaucuauug

SEQ ID NO: 811858 - RNA, 20 nt, Artificial Sequence
  Synthetic
uucuugaagaguaucuauug

SEQ ID NO: 811859 - RNA, 20 nt, Artificial Sequence
  Synthetic
aauucaguugguaucuauug

SEQ ID NO: 811860 - RNA, 20 nt, Artificial Sequence
  Synthetic
ccucauguucuauucuauug

SEQ ID NO: 811861 - RNA, 20 nt, Artificial Sequence
  Synthetic
uuauuuuuucaaaaguauug

SEQ ID NO: 811862 - RNA, 20 nt, Artificial Sequence
  Synthetic
cuguuuuuauggcaguauug

SEQ ID NO: 811863 - RNA, 20 nt, Artificial Sequence
  Synthetic
uuacagugugcaagguauug

SEQ ID NO: 811864 - RNA, 20 nt, Artificial Sequence
  Synthetic
uaaauaauaaggagguauug

SEQ ID NO: 811865 - RNA, 20 nt, Artificial Sequence
  Synthetic
agaaaugucauuugguauug

SEQ ID NO: 811866 - RNA, 20 nt, Artificial Sequence
  Synthetic
ucuuuaauaaaaauguauug

SEQ ID NO: 811867 - RNA, 20 nt, Artificial Sequence
  Synthetic
uauauaaaaugcauguauug

SEQ ID NO: 811868 - RNA, 20 nt, Artificial Sequence
  Synthetic
acgacaugcagccuguauug

SEQ ID NO: 811869 - RNA, 20 nt, Artificial Sequence
  Synthetic
aauacaaaugaucuguauug

SEQ ID NO: 811870 - RNA, 20 nt, Artificial Sequence
  Synthetic
cuccugcuguuauuguauug

SEQ ID NO: 811871 - RNA, 20 nt, Artificial Sequence
  Synthetic
uuuuccccauuuuuguauug

SEQ ID NO: 811872 - RNA, 20 nt, Artificial Sequence
  Synthetic
uauuuuucuguaaauuauug

SEQ ID NO: 811873 - RNA, 20 nt, Artificial Sequence
  Synthetic
aaccuuaagauuaauuauug

SEQ ID NO: 811874 - RNA, 20 nt, Artificial Sequence
  Synthetic
cuugucacacagcauuauug

SEQ ID NO: 811875 - RNA, 20 nt, Artificial Sequence
  Synthetic
uuugugucacagcauuauug

SEQ ID NO: 811876 - RNA, 20 nt, Artificial Sequence
  Synthetic
acggauuagcaucauuauug

SEQ ID NO: 811877 - RNA, 20 nt, Artificial Sequence
  Synthetic
aacuaaaauuaugauuauug

SEQ ID NO: 811878 - RNA, 20 nt, Artificial Sequence
  Synthetic
auaguaauauacuauuauug

SEQ ID NO: 811879 - RNA, 20 nt, Artificial Sequence
  Synthetic
ucucauuucucugcuuauug

SEQ ID NO: 811880 - RNA, 20 nt, Artificial Sequence
  Synthetic
agagccaagaagucuuauug

SEQ ID NO: 811881 - RNA, 20 nt, Artificial Sequence
  Synthetic
uguuuuucucuaaguuauug

SEQ ID NO: 811882 - RNA, 20 nt, Artificial Sequence
  Synthetic
agcacuucacagaguuauug

SEQ ID NO: 811883 - RNA, 20 nt, Artificial Sequence
  Synthetic
aaugcaacagccauuuauug

SEQ ID NO: 811884 - RNA, 20 nt, Artificial Sequence
  Synthetic
ugauaaacaagcauuuauug

SEQ ID NO: 811885 - RNA, 20 nt, Artificial Sequence
  Synthetic
uuuuuuaaacuacuuuauug

SEQ ID NO: 811886 - RNA, 20 nt, Artificial Sequence
  Synthetic
auguauccaugaguuuauug

SEQ ID NO: 811887 - RNA, 20 nt, Artificial Sequence
  Synthetic
augcacacguauguuuauug

SEQ ID NO: 811888 - RNA, 20 nt, Artificial Sequence
  Synthetic
cugcacacguauguuuauug

SEQ ID NO: 811889 - RNA, 20 nt, Artificial Sequence
  Synthetic
augcacauguauguuuauug

SEQ ID NO: 811890 - RNA, 20 nt, Artificial Sequence
  Synthetic
uuuuaaauuuaauuuuauug

SEQ ID NO: 811891 - RNA, 20 nt, Artificial Sequence
  Synthetic
uggaaauuuuuauuuuauug

SEQ ID NO: 811892 - RNA, 20 nt, Artificial Sequence
  Synthetic
cuaacaugccacuuuuauug

SEQ ID NO: 811893 - RNA, 20 nt, Artificial Sequence
  Synthetic
aauuccuuuuuguuuuauug

SEQ ID NO: 811894 - RNA, 20 nt, Artificial Sequence
  Synthetic
uuuuuuuaaauuuuuuauug

SEQ ID NO: 811895 - RNA, 20 nt, Artificial Sequence
  Synthetic
caggaucccagaaaaacuug

SEQ ID NO: 811896 - RNA, 20 nt, Artificial Sequence
  Synthetic
uaaguaaauaaauaaacuug

SEQ ID NO: 811897 - RNA, 20 nt, Artificial Sequence
  Synthetic
uuuagaauuuucuaaacuug

SEQ ID NO: 811898 - RNA, 20 nt, Artificial Sequence
  Synthetic
uguaguuuaauuucaacuug

SEQ ID NO: 811899 - RNA, 20 nt, Artificial Sequence
  Synthetic
cuuuccagaaggagaacuug

SEQ ID NO: 811900 - RNA, 20 nt, Artificial Sequence
  Synthetic
aaauaauaucugagaacuug

SEQ ID NO: 811901 - RNA, 20 nt, Artificial Sequence
  Synthetic
ugaagccuugacauaacuug

SEQ ID NO: 811902 - RNA, 20 nt, Artificial Sequence
  Synthetic
aaguagaucaguauaacuug

SEQ ID NO: 811903 - RNA, 20 nt, Artificial Sequence
  Synthetic
agguacccaagucuaacuug

SEQ ID NO: 811904 - RNA, 20 nt, Artificial Sequence
  Synthetic
aauuaaaguuauuuaacuug

SEQ ID NO: 811905 - RNA, 20 nt, Artificial Sequence
  Synthetic
ugauucacagacaacacuug

SEQ ID NO: 811906 - RNA, 20 nt, Artificial Sequence
  Synthetic
ugagguggguggaacacuug

SEQ ID NO: 811907 - RNA, 20 nt, Artificial Sequence
  Synthetic
auugauauccauaacacuug

SEQ ID NO: 811908 - RNA, 20 nt, Artificial Sequence
  Synthetic
ugcacucaagauaacacuug

SEQ ID NO: 811909 - RNA, 20 nt, Artificial Sequence
  Synthetic
ugaaaaauauuucacacuug

SEQ ID NO: 811910 - RNA, 20 nt, Artificial Sequence
  Synthetic
aagguauagaaauacacuug

SEQ ID NO: 811911 - RNA, 20 nt, Artificial Sequence
  Synthetic
ucagauaauuauaccacuug

SEQ ID NO: 811912 - RNA, 20 nt, Artificial Sequence
  Synthetic
caguguugagggcccacuug

SEQ ID NO: 811913 - RNA, 20 nt, Artificial Sequence
  Synthetic
caaggagggcaggccacuug

SEQ ID NO: 811914 - RNA, 20 nt, Artificial Sequence
  Synthetic
ugaggagggcagaucacuug

SEQ ID NO: 811915 - RNA, 20 nt, Artificial Sequence
  Synthetic
cgaggugggcagaucacuug

SEQ ID NO: 811916 - RNA, 20 nt, Artificial Sequence
  Synthetic
ugaggcugacggaucacuug

SEQ ID NO: 811917 - RNA, 20 nt, Artificial Sequence
  Synthetic
ugaggcaggcggaucacuug

SEQ ID NO: 811918 - RNA, 20 nt, Artificial Sequence
  Synthetic
cgaggugggcggaucacuug

SEQ ID NO: 811919 - RNA, 20 nt, Artificial Sequence
  Synthetic
cgaugugggcggaucacuug

SEQ ID NO: 811920 - RNA, 20 nt, Artificial Sequence
  Synthetic
ugaggcagguggaucacuug

SEQ ID NO: 811921 - RNA, 20 nt, Artificial Sequence
  Synthetic
cgaaguagguggaucacuug

SEQ ID NO: 811922 - RNA, 20 nt, Artificial Sequence
  Synthetic
cgaaauggguggaucacuug

SEQ ID NO: 811923 - RNA, 20 nt, Artificial Sequence
  Synthetic
uuguaucaaaauaucacuug

SEQ ID NO: 811924 - RNA, 20 nt, Artificial Sequence
  Synthetic
cuuuguccaguccucacuug

SEQ ID NO: 811925 - RNA, 20 nt, Artificial Sequence
  Synthetic
ucuuuucuaaaucucacuug

SEQ ID NO: 811926 - RNA, 20 nt, Artificial Sequence
  Synthetic
auuuuucacaaaaagacuug

SEQ ID NO: 811927 - RNA, 20 nt, Artificial Sequence
  Synthetic
cauuugcagaacaagacuug

SEQ ID NO: 811928 - RNA, 20 nt, Artificial Sequence
  Synthetic
ugucuuucucugaagacuug

SEQ ID NO: 811929 - RNA, 20 nt, Artificial Sequence
  Synthetic
cccaggcaugaacagacuug

SEQ ID NO: 811930 - RNA, 20 nt, Artificial Sequence
  Synthetic
aacaaguaauuagagacuug

SEQ ID NO: 811931 - RNA, 20 nt, Artificial Sequence
  Synthetic
caaugggcuuuggagacuug

SEQ ID NO: 811932 - RNA, 20 nt, Artificial Sequence
  Synthetic
acacauuugggugagacuug

SEQ ID NO: 811933 - RNA, 20 nt, Artificial Sequence
  Synthetic
uugacaacuguuuagacuug

SEQ ID NO: 811934 - RNA, 20 nt, Artificial Sequence
  Synthetic
aacacacacaugaggacuug

SEQ ID NO: 811935 - RNA, 20 nt, Artificial Sequence
  Synthetic
cugggucgaguggggacuug

SEQ ID NO: 811936 - RNA, 20 nt, Artificial Sequence
  Synthetic
aucucuggggaugggacuug

SEQ ID NO: 811937 - RNA, 20 nt, Artificial Sequence
  Synthetic
aaugccaaguguuggacuug

SEQ ID NO: 811938 - RNA, 20 nt, Artificial Sequence
  Synthetic
augacaaagaacaugacuug

SEQ ID NO: 811939 - RNA, 20 nt, Artificial Sequence
  Synthetic
ugagucggguggaugacuug

SEQ ID NO: 811940 - RNA, 20 nt, Artificial Sequence
  Synthetic
cccaaaaugugaaauacuug

SEQ ID NO: 811941 - RNA, 20 nt, Artificial Sequence
  Synthetic
aguggcacucuaaauacuug

SEQ ID NO: 811942 - RNA, 20 nt, Artificial Sequence
  Synthetic
uauacuaaaauauauacuug

SEQ ID NO: 811943 - RNA, 20 nt, Artificial Sequence
  Synthetic
uugauagagccugguacuug

SEQ ID NO: 811944 - RNA, 20 nt, Artificial Sequence
  Synthetic
uacaagaauuguuguacuug

SEQ ID NO: 811945 - RNA, 20 nt, Artificial Sequence
  Synthetic
ccucuuagguucauuacuug

SEQ ID NO: 811946 - RNA, 20 nt, Artificial Sequence
  Synthetic
uauaaaauuguuauuacuug

SEQ ID NO: 811947 - RNA, 20 nt, Artificial Sequence
  Synthetic
cacuuguuauggcuuacuug

SEQ ID NO: 811948 - RNA, 20 nt, Artificial Sequence
  Synthetic
caucaugaaccucuuacuug

SEQ ID NO: 811949 - RNA, 20 nt, Artificial Sequence
  Synthetic
uggaaggucugauaaccuug

SEQ ID NO: 811950 - RNA, 20 nt, Artificial Sequence
  Synthetic
acacacacacacacaccuug

SEQ ID NO: 811951 - RNA, 20 nt, Artificial Sequence
  Synthetic
auauacuccacagcaccuug

SEQ ID NO: 811952 - RNA, 20 nt, Artificial Sequence
  Synthetic
uuccuaaugucaucaccuug

SEQ ID NO: 811953 - RNA, 20 nt, Artificial Sequence
  Synthetic
ucucuacccugcugaccuug

SEQ ID NO: 811954 - RNA, 20 nt, Artificial Sequence
  Synthetic
cacuaaaccaaacuaccuug

SEQ ID NO: 811955 - RNA, 20 nt, Artificial Sequence
  Synthetic
uaauuaagaagccuaccuug

SEQ ID NO: 811956 - RNA, 20 nt, Artificial Sequence
  Synthetic
aucuuaucagacaacccuug

SEQ ID NO: 811957 - RNA, 20 nt, Artificial Sequence
  Synthetic
uagaguuucaguaacccuug

SEQ ID NO: 811958 - RNA, 20 nt, Artificial Sequence
  Synthetic
uuuccuaaaugauacccuug

SEQ ID NO: 811959 - RNA, 20 nt, Artificial Sequence
  Synthetic
uccuugccuuuacccccuug

SEQ ID NO: 811960 - RNA, 20 nt, Artificial Sequence
  Synthetic
auauauuauucaugcccuug

SEQ ID NO: 811961 - RNA, 20 nt, Artificial Sequence
  Synthetic
cuugggcagcucugcccuug

SEQ ID NO: 811962 - RNA, 20 nt, Artificial Sequence
  Synthetic
acgugcgugcagaucccuug

SEQ ID NO: 811963 - RNA, 20 nt, Artificial Sequence
  Synthetic
ccaggauggaggaucccuug

SEQ ID NO: 811964 - RNA, 20 nt, Artificial Sequence
  Synthetic
cauaauuuuccuaucccuug

SEQ ID NO: 811965 - RNA, 20 nt, Artificial Sequence
  Synthetic
aacaaauuuucacucccuug

SEQ ID NO: 811966 - RNA, 20 nt, Artificial Sequence
  Synthetic
uacaucacaaaagucccuug

SEQ ID NO: 811967 - RNA, 20 nt, Artificial Sequence
  Synthetic
auugaucucucagucccuug

SEQ ID NO: 811968 - RNA, 20 nt, Artificial Sequence
  Synthetic
acauuuccaaaugucccuug

SEQ ID NO: 811969 - RNA, 20 nt, Artificial Sequence
  Synthetic
uauuauagauuugucccuug

SEQ ID NO: 811970 - RNA, 20 nt, Artificial Sequence
  Synthetic
accaaaguuaaauucccuug

SEQ ID NO: 811971 - RNA, 20 nt, Artificial Sequence
  Synthetic
ucuccccaauucuucccuug

SEQ ID NO: 811972 - RNA, 20 nt, Artificial Sequence
  Synthetic
agaggaucuuucuucccuug

SEQ ID NO: 811973 - RNA, 20 nt, Artificial Sequence
  Synthetic
auguuucucauguucccuug

SEQ ID NO: 811974 - RNA, 20 nt, Artificial Sequence
  Synthetic
ucacuaccagcuuucccuug

SEQ ID NO: 811975 - RNA, 20 nt, Artificial Sequence
  Synthetic
acagcccaugguuucccuug

SEQ ID NO: 811976 - RNA, 20 nt, Artificial Sequence
  Synthetic
aggacuuggcuugagccuug

SEQ ID NO: 811977 - RNA, 20 nt, Artificial Sequence
  Synthetic
aaacaaguacaaaggccuug

SEQ ID NO: 811978 - RNA, 20 nt, Artificial Sequence
  Synthetic
ccuuagccuuucaggccuug

SEQ ID NO: 811979 - RNA, 20 nt, Artificial Sequence
  Synthetic
uuuaaaaauacagggccuug

SEQ ID NO: 811980 - RNA, 20 nt, Artificial Sequence
  Synthetic
acaagaaaugaugggccuug

SEQ ID NO: 811981 - RNA, 20 nt, Artificial Sequence
  Synthetic
ucuguuggaggguggccuug

SEQ ID NO: 811982 - RNA, 20 nt, Artificial Sequence
  Synthetic
aacccuguuuaaaugccuug

SEQ ID NO: 811983 - RNA, 20 nt, Artificial Sequence
  Synthetic
uuugauuauugcaugccuug

SEQ ID NO: 811984 - RNA, 20 nt, Artificial Sequence
  Synthetic
uuucugugugcagugccuug

SEQ ID NO: 811985 - RNA, 20 nt, Artificial Sequence
  Synthetic
uuuuaacuucuguugccuug

SEQ ID NO: 811986 - RNA, 20 nt, Artificial Sequence
  Synthetic
uuaaacauggaacauccuug

SEQ ID NO: 811987 - RNA, 20 nt, Artificial Sequence
  Synthetic
uuucuaguucuagauccuug

SEQ ID NO: 811988 - RNA, 20 nt, Artificial Sequence
  Synthetic
cuucugguucuagauccuug

SEQ ID NO: 811989 - RNA, 20 nt, Artificial Sequence
  Synthetic
uuucugguucuagauccuug

SEQ ID NO: 811990 - RNA, 20 nt, Artificial Sequence
  Synthetic
uuucugguuguagauccuug

SEQ ID NO: 811991 - RNA, 20 nt, Artificial Sequence
  Synthetic
uuucugguucuguauccuug

SEQ ID NO: 811992 - RNA, 20 nt, Artificial Sequence
  Synthetic
uuucuccuccauccuccuug

SEQ ID NO: 811993 - RNA, 20 nt, Artificial Sequence
  Synthetic
caaguuaaaauggcuccuug

SEQ ID NO: 811994 - RNA, 20 nt, Artificial Sequence
  Synthetic
uaaaaaguacuaucuccuug

SEQ ID NO: 811995 - RNA, 20 nt, Artificial Sequence
  Synthetic
ugugagaugguaucuccuug

SEQ ID NO: 811996 - RNA, 20 nt, Artificial Sequence
  Synthetic
uaugugaugguaucuccuug

SEQ ID NO: 811997 - RNA, 20 nt, Artificial Sequence
  Synthetic
ucauuuuuauuagguccuug

SEQ ID NO: 811998 - RNA, 20 nt, Artificial Sequence
  Synthetic
aacauuuuggcugguccuug

SEQ ID NO: 811999 - RNA, 20 nt, Artificial Sequence
  Synthetic
accaggcuccuguguccuug

SEQ ID NO: 812000 - RNA, 20 nt, Artificial Sequence
  Synthetic
augguuaaacgaauuccuug

SEQ ID NO: 812001 - RNA, 20 nt, Artificial Sequence
  Synthetic
uuggccuaaauaauuccuug

SEQ ID NO: 812002 - RNA, 20 nt, Artificial Sequence
  Synthetic
uugugcucuucucuuccuug

SEQ ID NO: 812003 - RNA, 20 nt, Artificial Sequence
  Synthetic
cagaauuuauuauuuccuug

SEQ ID NO: 812004 - RNA, 20 nt, Artificial Sequence
  Synthetic
agaaagcaagucuaagcuug

SEQ ID NO: 812005 - RNA, 20 nt, Artificial Sequence
  Synthetic
ugcugccugcauacagcuug

SEQ ID NO: 812006 - RNA, 20 nt, Artificial Sequence
  Synthetic
cuauuaagccacccagcuug

SEQ ID NO: 812007 - RNA, 20 nt, Artificial Sequence
  Synthetic
caugaaaggagcccagcuug

SEQ ID NO: 812008 - RNA, 20 nt, Artificial Sequence
  Synthetic
uucucaggcccagcagcuug

SEQ ID NO: 812009 - RNA, 20 nt, Artificial Sequence
  Synthetic
auaaacaaagccgcagcuug

SEQ ID NO: 812010 - RNA, 20 nt, Artificial Sequence
  Synthetic
agggcucuuccaucagcuug

SEQ ID NO: 812011 - RNA, 20 nt, Artificial Sequence
  Synthetic
uccucccccaagucagcuug

SEQ ID NO: 812012 - RNA, 20 nt, Artificial Sequence
  Synthetic
cugaaguaaauuagagcuug

SEQ ID NO: 812013 - RNA, 20 nt, Artificial Sequence
  Synthetic
aacccaggagguggagcuug

SEQ ID NO: 812014 - RNA, 20 nt, Artificial Sequence
  Synthetic
aauccgggagguggagcuug

SEQ ID NO: 812015 - RNA, 20 nt, Artificial Sequence
  Synthetic
ugugguguaaggaucgcuug

SEQ ID NO: 812016 - RNA, 20 nt, Artificial Sequence
  Synthetic
ugaggcggguggaucgcuug

SEQ ID NO: 812017 - RNA, 20 nt, Artificial Sequence
  Synthetic
accucagaacuuaaggcuug

SEQ ID NO: 812018 - RNA, 20 nt, Artificial Sequence
  Synthetic
acucugauuuaguaggcuug

SEQ ID NO: 812019 - RNA, 20 nt, Artificial Sequence
  Synthetic
cauggcacaaaaagggcuug

SEQ ID NO: 812020 - RNA, 20 nt, Artificial Sequence
  Synthetic
auuaauagugguggggcuug

SEQ ID NO: 812021 - RNA, 20 nt, Artificial Sequence
  Synthetic
auagauuuuggacuggcuug

SEQ ID NO: 812022 - RNA, 20 nt, Artificial Sequence
  Synthetic
uuggaagucuuacuggcuug

SEQ ID NO: 812023 - RNA, 20 nt, Artificial Sequence
  Synthetic
agucugauaucauuggcuug

SEQ ID NO: 812024 - RNA, 20 nt, Artificial Sequence
  Synthetic
agaagugcuuauuuggcuug

SEQ ID NO: 812025 - RNA, 20 nt, Artificial Sequence
  Synthetic
augcucccauaaaaugcuug

SEQ ID NO: 812026 - RNA, 20 nt, Artificial Sequence
  Synthetic
acauaaagaauaaaugcuug

SEQ ID NO: 812027 - RNA, 20 nt, Artificial Sequence
  Synthetic
ucauuuucauuacaugcuug

SEQ ID NO: 812028 - RNA, 20 nt, Artificial Sequence
  Synthetic
acugugggcugcacugcuug

SEQ ID NO: 812029 - RNA, 20 nt, Artificial Sequence
  Synthetic
aaagaugauguagcugcuug

SEQ ID NO: 812030 - RNA, 20 nt, Artificial Sequence
  Synthetic
augguuugaacugcugcuug

SEQ ID NO: 812031 - RNA, 20 nt, Artificial Sequence
  Synthetic
augauucuugauucugcuug

SEQ ID NO: 812032 - RNA, 20 nt, Artificial Sequence
  Synthetic
uagccuuuuucuucugcuug

SEQ ID NO: 812033 - RNA, 20 nt, Artificial Sequence
  Synthetic
acaaaguggaaaagugcuug

SEQ ID NO: 812034 - RNA, 20 nt, Artificial Sequence
  Synthetic
uuuaauauuagaagugcuug

SEQ ID NO: 812035 - RNA, 20 nt, Artificial Sequence
  Synthetic
ccauacguucauggugcuug

SEQ ID NO: 812036 - RNA, 20 nt, Artificial Sequence
  Synthetic
uggcaacagaaaugugcuug

SEQ ID NO: 812037 - RNA, 20 nt, Artificial Sequence
  Synthetic
aggauuuucugaugugcuug

SEQ ID NO: 812038 - RNA, 20 nt, Artificial Sequence
  Synthetic
caaggaaggagaauugcuug

SEQ ID NO: 812039 - RNA, 20 nt, Artificial Sequence
  Synthetic
aaacaaagaauaauugcuug

SEQ ID NO: 812040 - RNA, 20 nt, Artificial Sequence
  Synthetic
acagaaaagauaauugcuug

SEQ ID NO: 812041 - RNA, 20 nt, Artificial Sequence
  Synthetic
caaggcaagaggauugcuug

SEQ ID NO: 812042 - RNA, 20 nt, Artificial Sequence
  Synthetic
uacuugcaucucuuugcuug

SEQ ID NO: 812043 - RNA, 20 nt, Artificial Sequence
  Synthetic
ucccacuuaggguuugcuug

SEQ ID NO: 812044 - RNA, 20 nt, Artificial Sequence
  Synthetic
uuuuccagguuuuuugcuug

SEQ ID NO: 812045 - RNA, 20 nt, Artificial Sequence
  Synthetic
uauccaguaacaaaaucuug

SEQ ID NO: 812046 - RNA, 20 nt, Artificial Sequence
  Synthetic
auggaagcugccaaaucuug

SEQ ID NO: 812047 - RNA, 20 nt, Artificial Sequence
  Synthetic
aucuaugaugugaaaucuug

SEQ ID NO: 812048 - RNA, 20 nt, Artificial Sequence
  Synthetic
aaacagcagauucaaucuug

SEQ ID NO: 812049 - RNA, 20 nt, Artificial Sequence
  Synthetic
auugcaucuaaaacaucuug

SEQ ID NO: 812050 - RNA, 20 nt, Artificial Sequence
  Synthetic
auggaugcuugaacaucuug

SEQ ID NO: 812051 - RNA, 20 nt, Artificial Sequence
  Synthetic
cauuuguguagagcaucuug

SEQ ID NO: 812052 - RNA, 20 nt, Artificial Sequence
  Synthetic
cugacauuggaggcaucuug

SEQ ID NO: 812053 - RNA, 20 nt, Artificial Sequence
  Synthetic
ccuaaauugcuuucaucuug

SEQ ID NO: 812054 - RNA, 20 nt, Artificial Sequence
  Synthetic
uugccuugucuuucaucuug

SEQ ID NO: 812055 - RNA, 20 nt, Artificial Sequence
  Synthetic
uuuauuguauauuuaucuug

SEQ ID NO: 812056 - RNA, 20 nt, Artificial Sequence
  Synthetic
agcucuguuaauuacucuug

SEQ ID NO: 812057 - RNA, 20 nt, Artificial Sequence
  Synthetic
auacauuuguguaccucuug

SEQ ID NO: 812058 - RNA, 20 nt, Artificial Sequence
  Synthetic
uccauccugccucccucuug

SEQ ID NO: 812059 - RNA, 20 nt, Artificial Sequence
  Synthetic
acuguaaucucagccucuug

SEQ ID NO: 812060 - RNA, 20 nt, Artificial Sequence
  Synthetic
aguuguaaauauggcucuug

SEQ ID NO: 812061 - RNA, 20 nt, Artificial Sequence
  Synthetic
cacagugccaucugcucuug

SEQ ID NO: 812062 - RNA, 20 nt, Artificial Sequence
  Synthetic
ucuuacucaguacucucuug

SEQ ID NO: 812063 - RNA, 20 nt, Artificial Sequence
  Synthetic
uuuucauccccucucucuug

SEQ ID NO: 812064 - RNA, 20 nt, Artificial Sequence
  Synthetic
cagacuaagacagucucuug

SEQ ID NO: 812065 - RNA, 20 nt, Artificial Sequence
  Synthetic
cuaggcauuuuauucucuug

SEQ ID NO: 812066 - RNA, 20 nt, Artificial Sequence
  Synthetic
aauacauccaucuucucuug

SEQ ID NO: 812067 - RNA, 20 nt, Artificial Sequence
  Synthetic
uauggugggcuuuucucuug

SEQ ID NO: 812068 - RNA, 20 nt, Artificial Sequence
  Synthetic
ucacaggaaaaacagucuug

SEQ ID NO: 812069 - RNA, 20 nt, Artificial Sequence
  Synthetic
aaauagccaaaacagucuug

SEQ ID NO: 812070 - RNA, 20 nt, Artificial Sequence
  Synthetic
cuuuaguuuauggagucuug

SEQ ID NO: 812071 - RNA, 20 nt, Artificial Sequence
  Synthetic
uuucguagcaccaggucuug

SEQ ID NO: 812072 - RNA, 20 nt, Artificial Sequence
  Synthetic
uccagaaagaaaaugucuug

SEQ ID NO: 812073 - RNA, 20 nt, Artificial Sequence
  Synthetic
cuuaacaagaaaaugucuug

SEQ ID NO: 812074 - RNA, 20 nt, Artificial Sequence
  Synthetic
auuagacaaaacaugucuug

SEQ ID NO: 812075 - RNA, 20 nt, Artificial Sequence
  Synthetic
acguuauauaccuugucuug

SEQ ID NO: 812076 - RNA, 20 nt, Artificial Sequence
  Synthetic
ucuucuuaucuaaauucuug

SEQ ID NO: 812077 - RNA, 20 nt, Artificial Sequence
  Synthetic
cucauuuaacaacauucuug

SEQ ID NO: 812078 - RNA, 20 nt, Artificial Sequence
  Synthetic
cacuucuaagcucauucuug

SEQ ID NO: 812079 - RNA, 20 nt, Artificial Sequence
  Synthetic
ucccauuuuacugauucuug

SEQ ID NO: 812080 - RNA, 20 nt, Artificial Sequence
  Synthetic
cagaaggaaagugauucuug

SEQ ID NO: 812081 - RNA, 20 nt, Artificial Sequence
  Synthetic
ccuuauucauauacuucuug

SEQ ID NO: 812082 - RNA, 20 nt, Artificial Sequence
  Synthetic
ucuuuuuucuuaccuucuug

SEQ ID NO: 812083 - RNA, 20 nt, Artificial Sequence
  Synthetic
acucaauugugagcuucuug

SEQ ID NO: 812084 - RNA, 20 nt, Artificial Sequence
  Synthetic
uaggugaagagugcuucuug

SEQ ID NO: 812085 - RNA, 20 nt, Artificial Sequence
  Synthetic
ccaauguauucuucuucuug

SEQ ID NO: 812086 - RNA, 20 nt, Artificial Sequence
  Synthetic
aaaauaaauauuucuucuug

SEQ ID NO: 812087 - RNA, 20 nt, Artificial Sequence
  Synthetic
auccaaaacuaaaguucuug

SEQ ID NO: 812088 - RNA, 20 nt, Artificial Sequence
  Synthetic
caaccucugacauguucuug

SEQ ID NO: 812089 - RNA, 20 nt, Artificial Sequence
  Synthetic
ucuauuuaggaguguucuug

SEQ ID NO: 812090 - RNA, 20 nt, Artificial Sequence
  Synthetic
cagauucacuaaauuucuug

SEQ ID NO: 812091 - RNA, 20 nt, Artificial Sequence
  Synthetic
uuauaauacuucauuucuug

SEQ ID NO: 812092 - RNA, 20 nt, Artificial Sequence
  Synthetic
acagaauuacaccuuucuug

SEQ ID NO: 812093 - RNA, 20 nt, Artificial Sequence
  Synthetic
uuugaaaagcaccuuucuug

SEQ ID NO: 812094 - RNA, 20 nt, Artificial Sequence
  Synthetic
aggacuacuuuuuuuucuug

SEQ ID NO: 812095 - RNA, 20 nt, Artificial Sequence
  Synthetic
ugucuuuggaaaaaaaguug

SEQ ID NO: 812096 - RNA, 20 nt, Artificial Sequence
  Synthetic
uaaggagagaggcaaaguug

SEQ ID NO: 812097 - RNA, 20 nt, Artificial Sequence
  Synthetic
uaaaaguguuaaacaaguug

SEQ ID NO: 812098 - RNA, 20 nt, Artificial Sequence
  Synthetic
uaaaucuauagaacaaguug

SEQ ID NO: 812099 - RNA, 20 nt, Artificial Sequence
  Synthetic
uucacauugaagucaaguug

SEQ ID NO: 812100 - RNA, 20 nt, Artificial Sequence
  Synthetic
augagauguguaagaaguug

SEQ ID NO: 812101 - RNA, 20 nt, Artificial Sequence
  Synthetic
uuguauuacuugggaaguug

SEQ ID NO: 812102 - RNA, 20 nt, Artificial Sequence
  Synthetic
uaaauguccuagugaaguug

SEQ ID NO: 812103 - RNA, 20 nt, Artificial Sequence
  Synthetic
aaugcuugaaaaauaaguug

SEQ ID NO: 812104 - RNA, 20 nt, Artificial Sequence
  Synthetic
augagcacaaagauaaguug

SEQ ID NO: 812105 - RNA, 20 nt, Artificial Sequence
  Synthetic
aguuagaccuuaguaaguug

SEQ ID NO: 812106 - RNA, 20 nt, Artificial Sequence
  Synthetic
auucagauuaggguaaguug

SEQ ID NO: 812107 - RNA, 20 nt, Artificial Sequence
  Synthetic
agagaacucuuuguaaguug

SEQ ID NO: 812108 - RNA, 20 nt, Artificial Sequence
  Synthetic
uugaaguugcaguuaaguug

SEQ ID NO: 812109 - RNA, 20 nt, Artificial Sequence
  Synthetic
aaaaaauguaugcacaguug

SEQ ID NO: 812110 - RNA, 20 nt, Artificial Sequence
  Synthetic
ucaucuccaagucacaguug

SEQ ID NO: 812111 - RNA, 20 nt, Artificial Sequence
  Synthetic
auccccauaagauacaguug

SEQ ID NO: 812112 - RNA, 20 nt, Artificial Sequence
  Synthetic
ccugccuccugcuccaguug

SEQ ID NO: 812113 - RNA, 20 nt, Artificial Sequence
  Synthetic
caaauuguuucuuccaguug

SEQ ID NO: 812114 - RNA, 20 nt, Artificial Sequence
  Synthetic
auuauaaauucccgcaguug

SEQ ID NO: 812115 - RNA, 20 nt, Artificial Sequence
  Synthetic
accuggcuaguuggcaguug

SEQ ID NO: 812116 - RNA, 20 nt, Artificial Sequence
  Synthetic
augaacuuucaaugcaguug

SEQ ID NO: 812117 - RNA, 20 nt, Artificial Sequence
  Synthetic
uuuacuugauucugcaguug

SEQ ID NO: 812118 - RNA, 20 nt, Artificial Sequence
  Synthetic
ucuuucuaucugugcaguug

SEQ ID NO: 812119 - RNA, 20 nt, Artificial Sequence
  Synthetic
ugcuugagggaaaucaguug

SEQ ID NO: 812120 - RNA, 20 nt, Artificial Sequence
  Synthetic
ugugucaaaaucaucaguug

SEQ ID NO: 812121 - RNA, 20 nt, Artificial Sequence
  Synthetic
aagaauacacuagucaguug

SEQ ID NO: 812122 - RNA, 20 nt, Artificial Sequence
  Synthetic
aacaguucgauggucaguug

SEQ ID NO: 812123 - RNA, 20 nt, Artificial Sequence
  Synthetic
ucuguccaaaaugucaguug

SEQ ID NO: 812124 - RNA, 20 nt, Artificial Sequence
  Synthetic
aaacaaacuuuuuucaguug

SEQ ID NO: 812125 - RNA, 20 nt, Artificial Sequence
  Synthetic
cagaaaaguccucagaguug

SEQ ID NO: 812126 - RNA, 20 nt, Artificial Sequence
  Synthetic
uaaggggagagagagaguug

SEQ ID NO: 812127 - RNA, 20 nt, Artificial Sequence
  Synthetic
auugguugaugggagaguug

SEQ ID NO: 812128 - RNA, 20 nt, Artificial Sequence
  Synthetic
aaaaagggaagugagaguug

SEQ ID NO: 812129 - RNA, 20 nt, Artificial Sequence
  Synthetic
uuguauuuuuaguagaguug

SEQ ID NO: 812130 - RNA, 20 nt, Artificial Sequence
  Synthetic
aacauuugcccagggaguug

SEQ ID NO: 812131 - RNA, 20 nt, Artificial Sequence
  Synthetic
cuucugcuuggugggaguug

SEQ ID NO: 812132 - RNA, 20 nt, Artificial Sequence
  Synthetic
acuuuugagcuugggaguug

SEQ ID NO: 812133 - RNA, 20 nt, Artificial Sequence
  Synthetic
uuauuucaguuugggaguug

SEQ ID NO: 812134 - RNA, 20 nt, Artificial Sequence
  Synthetic
aucaaguaacccuggaguug

SEQ ID NO: 812135 - RNA, 20 nt, Artificial Sequence
  Synthetic
auggcugaagcacugaguug

SEQ ID NO: 812136 - RNA, 20 nt, Artificial Sequence
  Synthetic
agauuaauaugacugaguug

SEQ ID NO: 812137 - RNA, 20 nt, Artificial Sequence
  Synthetic
augaagucugaauugaguug

SEQ ID NO: 812138 - RNA, 20 nt, Artificial Sequence
  Synthetic
cuaauaaugcucaauaguug

SEQ ID NO: 812139 - RNA, 20 nt, Artificial Sequence
  Synthetic
cuucaaccagcuccuaguug

SEQ ID NO: 812140 - RNA, 20 nt, Artificial Sequence
  Synthetic
uuucuucauccugcuaguug

SEQ ID NO: 812141 - RNA, 20 nt, Artificial Sequence
  Synthetic
cauaucuuuaaaucuaguug

SEQ ID NO: 812142 - RNA, 20 nt, Artificial Sequence
  Synthetic
uacuuaauuaucaguaguug

SEQ ID NO: 812143 - RNA, 20 nt, Artificial Sequence
  Synthetic
auaagauugcagaguaguug

SEQ ID NO: 812144 - RNA, 20 nt, Artificial Sequence
  Synthetic
uuagaugaagaagguaguug

SEQ ID NO: 812145 - RNA, 20 nt, Artificial Sequence
  Synthetic
cauauuauuguauguaguug

SEQ ID NO: 812146 - RNA, 20 nt, Artificial Sequence
  Synthetic
ugcccauuuccuuguaguug

SEQ ID NO: 812147 - RNA, 20 nt, Artificial Sequence
  Synthetic
uacaaagaaauuuuuaguug

SEQ ID NO: 812148 - RNA, 20 nt, Artificial Sequence
  Synthetic
uuggguccccuuccacguug

SEQ ID NO: 812149 - RNA, 20 nt, Artificial Sequence
  Synthetic
acacaugggugaugacguug

SEQ ID NO: 812150 - RNA, 20 nt, Artificial Sequence
  Synthetic
aauaaucccauuguacguug

SEQ ID NO: 812151 - RNA, 20 nt, Artificial Sequence
  Synthetic
uagcuggcugggcuccguug

SEQ ID NO: 812152 - RNA, 20 nt, Artificial Sequence
  Synthetic
aaaaaguuagcugggcguug

SEQ ID NO: 812153 - RNA, 20 nt, Artificial Sequence
  Synthetic
cuuugaaacauagaucguug

SEQ ID NO: 812154 - RNA, 20 nt, Artificial Sequence
  Synthetic
ugugagaugcuaucucguug

SEQ ID NO: 812155 - RNA, 20 nt, Artificial Sequence
  Synthetic
ugugagacgguaucucguug

SEQ ID NO: 812156 - RNA, 20 nt, Artificial Sequence
  Synthetic
cucuggugccgaaaagguug

SEQ ID NO: 812157 - RNA, 20 nt, Artificial Sequence
  Synthetic
auauuuggaauuuaagguug

SEQ ID NO: 812158 - RNA, 20 nt, Artificial Sequence
  Synthetic
auuuaauaugguacagguug

SEQ ID NO: 812159 - RNA, 20 nt, Artificial Sequence
  Synthetic
uuccaaauguaggcagguug

SEQ ID NO: 812160 - RNA, 20 nt, Artificial Sequence
  Synthetic
agcugccuuuuaucagguug

SEQ ID NO: 812161 - RNA, 20 nt, Artificial Sequence
  Synthetic
uccauuaagagaagagguug

SEQ ID NO: 812162 - RNA, 20 nt, Artificial Sequence
  Synthetic
ugguagagagggagagguug

SEQ ID NO: 812163 - RNA, 20 nt, Artificial Sequence
  Synthetic
aaccugggugguagagguug

SEQ ID NO: 812164 - RNA, 20 nt, Artificial Sequence
  Synthetic
ucccacaucccacgagguug

SEQ ID NO: 812165 - RNA, 20 nt, Artificial Sequence
  Synthetic
uguuugagcacaggagguug

SEQ ID NO: 812166 - RNA, 20 nt, Artificial Sequence
  Synthetic
cccagcaacucuggagguug

SEQ ID NO: 812167 - RNA, 20 nt, Artificial Sequence
  Synthetic
aacccaggagguggagguug

SEQ ID NO: 812168 - RNA, 20 nt, Artificial Sequence
  Synthetic
uacuugggaggcugagguug

SEQ ID NO: 812169 - RNA, 20 nt, Artificial Sequence
  Synthetic
aaaugauggcucugagguug

SEQ ID NO: 812170 - RNA, 20 nt, Artificial Sequence
  Synthetic
cacccuggaggcauagguug

SEQ ID NO: 812171 - RNA, 20 nt, Artificial Sequence
  Synthetic
uuagaugaggucauagguug

SEQ ID NO: 812172 - RNA, 20 nt, Artificial Sequence
  Synthetic
uuaugacuaaagcuagguug

SEQ ID NO: 812173 - RNA, 20 nt, Artificial Sequence
  Synthetic
ugaaaacaaucaguagguug

SEQ ID NO: 812174 - RNA, 20 nt, Artificial Sequence
  Synthetic
uuugucagaugaguagguug

SEQ ID NO: 812175 - RNA, 20 nt, Artificial Sequence
  Synthetic
aaccugggagguguagguug

SEQ ID NO: 812176 - RNA, 20 nt, Artificial Sequence
  Synthetic
auuguaaguuggcaggguug

SEQ ID NO: 812177 - RNA, 20 nt, Artificial Sequence
  Synthetic
aucuguuggaaucaggguug

SEQ ID NO: 812178 - RNA, 20 nt, Artificial Sequence
  Synthetic
cuauauuugacucaggguug

SEQ ID NO: 812179 - RNA, 20 nt, Artificial Sequence
  Synthetic
caguuugaagcugaggguug

SEQ ID NO: 812180 - RNA, 20 nt, Artificial Sequence
  Synthetic
acuugggaaguugaggguug

SEQ ID NO: 812181 - RNA, 20 nt, Artificial Sequence
  Synthetic
cuccacuaaccuuaggguug

SEQ ID NO: 812182 - RNA, 20 nt, Artificial Sequence
  Synthetic
ccaaauaugcugggggguug

SEQ ID NO: 812183 - RNA, 20 nt, Artificial Sequence
  Synthetic
caggaaacagguggggguug

SEQ ID NO: 812184 - RNA, 20 nt, Artificial Sequence
  Synthetic
ucaacauaugaaugggguug

SEQ ID NO: 812185 - RNA, 20 nt, Artificial Sequence
  Synthetic
ucaaaaaguacaugggguug

SEQ ID NO: 812186 - RNA, 20 nt, Artificial Sequence
  Synthetic
aaucagcaucucugggguug

SEQ ID NO: 812187 - RNA, 20 nt, Artificial Sequence
  Synthetic
aucaggggcgggugggguug

SEQ ID NO: 812188 - RNA, 20 nt, Artificial Sequence
  Synthetic
cgcacacaguggugggguug

SEQ ID NO: 812189 - RNA, 20 nt, Artificial Sequence
  Synthetic
aauguaugugugugggguug

SEQ ID NO: 812190 - RNA, 20 nt, Artificial Sequence
  Synthetic
aaucauuugacaauggguug

SEQ ID NO: 812191 - RNA, 20 nt, Artificial Sequence
  Synthetic
acauaaaacagcauggguug

SEQ ID NO: 812192 - RNA, 20 nt, Artificial Sequence
  Synthetic
auuuacauauuaaaugguug

SEQ ID NO: 812193 - RNA, 20 nt, Artificial Sequence
  Synthetic
ucgggaacagcucaugguug

SEQ ID NO: 812194 - RNA, 20 nt, Artificial Sequence
  Synthetic
ugugaaaaaguucaugguug

SEQ ID NO: 812195 - RNA, 20 nt, Artificial Sequence
  Synthetic
caccugagccuggaugguug

SEQ ID NO: 812196 - RNA, 20 nt, Artificial Sequence
  Synthetic
cauagggugagguaugguug

SEQ ID NO: 812197 - RNA, 20 nt, Artificial Sequence
  Synthetic
caagaagcugguccugguug

SEQ ID NO: 812198 - RNA, 20 nt, Artificial Sequence
  Synthetic
uugccugacauuccugguug

SEQ ID NO: 812199 - RNA, 20 nt, Artificial Sequence
  Synthetic
aaacauuucuuuccugguug

SEQ ID NO: 812200 - RNA, 20 nt, Artificial Sequence
  Synthetic
aauuuuuaggaggcugguug

SEQ ID NO: 812201 - RNA, 20 nt, Artificial Sequence
  Synthetic
caaauagccuggcgugguug

SEQ ID NO: 812202 - RNA, 20 nt, Artificial Sequence
  Synthetic
cugaguaagggcggugguug

SEQ ID NO: 812203 - RNA, 20 nt, Artificial Sequence
  Synthetic
ucuguauaugguggugguug

SEQ ID NO: 812204 - RNA, 20 nt, Artificial Sequence
  Synthetic
uaaaaagagagaauugguug

SEQ ID NO: 812205 - RNA, 20 nt, Artificial Sequence
  Synthetic
aaguuauuuguuauugguug

SEQ ID NO: 812206 - RNA, 20 nt, Artificial Sequence
  Synthetic
auucaugcauugcuugguug

SEQ ID NO: 812207 - RNA, 20 nt, Artificial Sequence
  Synthetic
aaaugaguaauucuugguug

SEQ ID NO: 812208 - RNA, 20 nt, Artificial Sequence
  Synthetic
auaaaugauaaaguugguug

SEQ ID NO: 812209 - RNA, 20 nt, Artificial Sequence
  Synthetic
aggaagccacauaaauguug

SEQ ID NO: 812210 - RNA, 20 nt, Artificial Sequence
  Synthetic
ugagaaaauuauaaauguug

SEQ ID NO: 812211 - RNA, 20 nt, Artificial Sequence
  Synthetic
aggaguguuuguaaauguug

SEQ ID NO: 812212 - RNA, 20 nt, Artificial Sequence
  Synthetic
cagaaagaaaaacaauguug

SEQ ID NO: 812213 - RNA, 20 nt, Artificial Sequence
  Synthetic
uuuggcuuaggagaauguug

SEQ ID NO: 812214 - RNA, 20 nt, Artificial Sequence
  Synthetic
ucuugaauuccuacauguug

SEQ ID NO: 812215 - RNA, 20 nt, Artificial Sequence
  Synthetic
agaguggcaggcccauguug

SEQ ID NO: 812216 - RNA, 20 nt, Artificial Sequence
  Synthetic
cgucuccaagugccauguug

SEQ ID NO: 812217 - RNA, 20 nt, Artificial Sequence
  Synthetic
cucauuaaaacagcauguug

SEQ ID NO: 812218 - RNA, 20 nt, Artificial Sequence
  Synthetic
aucuccuggucugcauguug

SEQ ID NO: 812219 - RNA, 20 nt, Artificial Sequence
  Synthetic
aauaauuaagaaagauguug

SEQ ID NO: 812220 - RNA, 20 nt, Artificial Sequence
  Synthetic
aaaacucccaagagauguug

SEQ ID NO: 812221 - RNA, 20 nt, Artificial Sequence
  Synthetic
ccucccuaagagagauguug

SEQ ID NO: 812222 - RNA, 20 nt, Artificial Sequence
  Synthetic
ccuaccucacuaggauguug

SEQ ID NO: 812223 - RNA, 20 nt, Artificial Sequence
  Synthetic
aacuaauacuucugauguug

SEQ ID NO: 812224 - RNA, 20 nt, Artificial Sequence
  Synthetic
uuucuuucaagcauauguug

SEQ ID NO: 812225 - RNA, 20 nt, Artificial Sequence
  Synthetic
ugcuguauccucguauguug

SEQ ID NO: 812226 - RNA, 20 nt, Artificial Sequence
  Synthetic
acuuauuuuccuguauguug

SEQ ID NO: 812227 - RNA, 20 nt, Artificial Sequence
  Synthetic
auacgguuuuuauuauguug

SEQ ID NO: 812228 - RNA, 20 nt, Artificial Sequence
  Synthetic
ucacacccugggaacuguug

SEQ ID NO: 812229 - RNA, 20 nt, Artificial Sequence
  Synthetic
ucacacucuggggacuguug

SEQ ID NO: 812230 - RNA, 20 nt, Artificial Sequence
  Synthetic
uuccuacuacucuacuguug

SEQ ID NO: 812231 - RNA, 20 nt, Artificial Sequence
  Synthetic
cuuauuguguuuuacuguug

SEQ ID NO: 812232 - RNA, 20 nt, Artificial Sequence
  Synthetic
uucauuacuucucccuguug

SEQ ID NO: 812233 - RNA, 20 nt, Artificial Sequence
  Synthetic
aagucagugguagccuguug

SEQ ID NO: 812234 - RNA, 20 nt, Artificial Sequence
  Synthetic
ucacacaccagggccuguug

SEQ ID NO: 812235 - RNA, 20 nt, Artificial Sequence
  Synthetic
ucacacaccggggccuguug

SEQ ID NO: 812236 - RNA, 20 nt, Artificial Sequence
  Synthetic
uuaaagaaagaugccuguug

SEQ ID NO: 812237 - RNA, 20 nt, Artificial Sequence
  Synthetic
acacacacuggugccuguug

SEQ ID NO: 812238 - RNA, 20 nt, Artificial Sequence
  Synthetic
acccacacccuuuccuguug

SEQ ID NO: 812239 - RNA, 20 nt, Artificial Sequence
  Synthetic
acuggggcucaaugcuguug

SEQ ID NO: 812240 - RNA, 20 nt, Artificial Sequence
  Synthetic
uugugugggugaugcuguug

SEQ ID NO: 812241 - RNA, 20 nt, Artificial Sequence
  Synthetic
uaucaagccagcugcuguug

SEQ ID NO: 812242 - RNA, 20 nt, Artificial Sequence
  Synthetic
uccauacuauuuuucuguug

SEQ ID NO: 812243 - RNA, 20 nt, Artificial Sequence
  Synthetic
cuuuguuuauucaaguguug

SEQ ID NO: 812244 - RNA, 20 nt, Artificial Sequence
  Synthetic
cuaaugagggugaaguguug

SEQ ID NO: 812245 - RNA, 20 nt, Artificial Sequence
  Synthetic
ccaauaauccccacguguug

SEQ ID NO: 812246 - RNA, 20 nt, Artificial Sequence
  Synthetic
aaaaaaucagccggguguug

SEQ ID NO: 812247 - RNA, 20 nt, Artificial Sequence
  Synthetic
agucacuguuuuggguguug

SEQ ID NO: 812248 - RNA, 20 nt, Artificial Sequence
  Synthetic
agauagaaggguugguguug

SEQ ID NO: 812249 - RNA, 20 nt, Artificial Sequence
  Synthetic
cuuucuaauucaauguguug

SEQ ID NO: 812250 - RNA, 20 nt, Artificial Sequence
  Synthetic
auuaaaaggcacauguguug

SEQ ID NO: 812251 - RNA, 20 nt, Artificial Sequence
  Synthetic
ccuguaauucccauguguug

SEQ ID NO: 812252 - RNA, 20 nt, Artificial Sequence
  Synthetic
ccaguggggacucuguguug

SEQ ID NO: 812253 - RNA, 20 nt, Artificial Sequence
  Synthetic
acaagaacacauguguguug

SEQ ID NO: 812254 - RNA, 20 nt, Artificial Sequence
  Synthetic
aguuuucuagauguguguug

SEQ ID NO: 812255 - RNA, 20 nt, Artificial Sequence
  Synthetic
augugccuguguguguguug

SEQ ID NO: 812256 - RNA, 20 nt, Artificial Sequence
  Synthetic
uuacuauuguguguguguug

SEQ ID NO: 812257 - RNA, 20 nt, Artificial Sequence
  Synthetic
aucucacaaacauauuguug

SEQ ID NO: 812258 - RNA, 20 nt, Artificial Sequence
  Synthetic
aauauguagguauauuguug

SEQ ID NO: 812259 - RNA, 20 nt, Artificial Sequence
  Synthetic
cccauaauuccuacuuguug

SEQ ID NO: 812260 - RNA, 20 nt, Artificial Sequence
  Synthetic
uaaauauggccuccuuguug

SEQ ID NO: 812261 - RNA, 20 nt, Artificial Sequence
  Synthetic
agagauaagaaauguuguug

SEQ ID NO: 812262 - RNA, 20 nt, Artificial Sequence
  Synthetic
cuacuucucuaccuuuguug

SEQ ID NO: 812263 - RNA, 20 nt, Artificial Sequence
  Synthetic
aaaacaacgucccuuuguug

SEQ ID NO: 812264 - RNA, 20 nt, Artificial Sequence
  Synthetic
agccaaauacaucuuuguug

SEQ ID NO: 812265 - RNA, 20 nt, Artificial Sequence
  Synthetic
uaguggaggaagguuuguug

SEQ ID NO: 812266 - RNA, 20 nt, Artificial Sequence
  Synthetic
ugugugcauaagguuuguug

SEQ ID NO: 812267 - RNA, 20 nt, Artificial Sequence
  Synthetic
aaaauccaucaauuuuguug

SEQ ID NO: 812268 - RNA, 20 nt, Artificial Sequence
  Synthetic
uuggcaagaucauuuuguug

SEQ ID NO: 812269 - RNA, 20 nt, Artificial Sequence
  Synthetic
uuuggcuauauguuuuguug

SEQ ID NO: 812270 - RNA, 20 nt, Artificial Sequence
  Synthetic
uggcaauugucaaaaauuug

SEQ ID NO: 812271 - RNA, 20 nt, Artificial Sequence
  Synthetic
aagcugaaaaacaaaauuug

SEQ ID NO: 812272 - RNA, 20 nt, Artificial Sequence
  Synthetic
agaagggcaaagaaaauuug

SEQ ID NO: 812273 - RNA, 20 nt, Artificial Sequence
  Synthetic
acacccaaugggaaaauuug

SEQ ID NO: 812274 - RNA, 20 nt, Artificial Sequence
  Synthetic
ugauaaacaacacaaauuug

SEQ ID NO: 812275 - RNA, 20 nt, Artificial Sequence
  Synthetic
auugcuauaacucaaauuug

SEQ ID NO: 812276 - RNA, 20 nt, Artificial Sequence
  Synthetic
uucuauuuucuucaaauuug

SEQ ID NO: 812277 - RNA, 20 nt, Artificial Sequence
  Synthetic
uuuccaacacaugaaauuug

SEQ ID NO: 812278 - RNA, 20 nt, Artificial Sequence
  Synthetic
uuaauaacaugcuaaauuug

SEQ ID NO: 812279 - RNA, 20 nt, Artificial Sequence
  Synthetic
aaaggaguucuaucaauuug

SEQ ID NO: 812280 - RNA, 20 nt, Artificial Sequence
  Synthetic
agaggacuuaauucaauuug

SEQ ID NO: 812281 - RNA, 20 nt, Artificial Sequence
  Synthetic
agaagguuuuuaagaauuug

SEQ ID NO: 812282 - RNA, 20 nt, Artificial Sequence
  Synthetic
agaaggaacaucagaauuug

SEQ ID NO: 812283 - RNA, 20 nt, Artificial Sequence
  Synthetic
cucaaugaaguuagaauuug

SEQ ID NO: 812284 - RNA, 20 nt, Artificial Sequence
  Synthetic
cacagcuaguaaggaauuug

SEQ ID NO: 812285 - RNA, 20 nt, Artificial Sequence
  Synthetic
cacggcccagcaugaauuug

SEQ ID NO: 812286 - RNA, 20 nt, Artificial Sequence
  Synthetic
auaugaacaauaugaauuug

SEQ ID NO: 812287 - RNA, 20 nt, Artificial Sequence
  Synthetic
aaaugaaacuucugaauuug

SEQ ID NO: 812288 - RNA, 20 nt, Artificial Sequence
  Synthetic
ucugucuauuguugaauuug

SEQ ID NO: 812289 - RNA, 20 nt, Artificial Sequence
  Synthetic
aagacaaacauuugaauuug

SEQ ID NO: 812290 - RNA, 20 nt, Artificial Sequence
  Synthetic
accaauauagaaauaauuug

SEQ ID NO: 812291 - RNA, 20 nt, Artificial Sequence
  Synthetic
auuuuuuuuuccauaauuug

SEQ ID NO: 812292 - RNA, 20 nt, Artificial Sequence
  Synthetic
caugaauggaugauaauuug

SEQ ID NO: 812293 - RNA, 20 nt, Artificial Sequence
  Synthetic
acugaaaauaauauaauuug

SEQ ID NO: 812294 - RNA, 20 nt, Artificial Sequence
  Synthetic
uucuugaguucacuaauuug

SEQ ID NO: 812295 - RNA, 20 nt, Artificial Sequence
  Synthetic
uaauugguauuacuaauuug

SEQ ID NO: 812296 - RNA, 20 nt, Artificial Sequence
  Synthetic
aaagaacaguagguaauuug

SEQ ID NO: 812297 - RNA, 20 nt, Artificial Sequence
  Synthetic
auuuaauagucuguaauuug

SEQ ID NO: 812298 - RNA, 20 nt, Artificial Sequence
  Synthetic
acaguguggcagaacauuug

SEQ ID NO: 812299 - RNA, 20 nt, Artificial Sequence
  Synthetic
auaugucacuugaacauuug

SEQ ID NO: 812300 - RNA, 20 nt, Artificial Sequence
  Synthetic
auccauggguuccacauuug

SEQ ID NO: 812301 - RNA, 20 nt, Artificial Sequence
  Synthetic
uuugagauaaggcacauuug

SEQ ID NO: 812302 - RNA, 20 nt, Artificial Sequence
  Synthetic
auuuucauaucucacauuug

SEQ ID NO: 812303 - RNA, 20 nt, Artificial Sequence
  Synthetic
augaaauccuaagacauuug

SEQ ID NO: 812304 - RNA, 20 nt, Artificial Sequence
  Synthetic
aagaguaugauugacauuug

SEQ ID NO: 812305 - RNA, 20 nt, Artificial Sequence
  Synthetic
uccagcuccugauacauuug

SEQ ID NO: 812306 - RNA, 20 nt, Artificial Sequence
  Synthetic
auuuuaagucucuacauuug

SEQ ID NO: 812307 - RNA, 20 nt, Artificial Sequence
  Synthetic
uucuuucacucuuacauuug

SEQ ID NO: 812308 - RNA, 20 nt, Artificial Sequence
  Synthetic
uaacuuacagacaccauuug

SEQ ID NO: 812309 - RNA, 20 nt, Artificial Sequence
  Synthetic
cuucccguauaacccauuug

SEQ ID NO: 812310 - RNA, 20 nt, Artificial Sequence
  Synthetic
uuuugagcuaaagccauuug

SEQ ID NO: 812311 - RNA, 20 nt, Artificial Sequence
  Synthetic
uuauuaagauaaagcauuug

SEQ ID NO: 812312 - RNA, 20 nt, Artificial Sequence
  Synthetic
uaauccaucugaagcauuug

SEQ ID NO: 812313 - RNA, 20 nt, Artificial Sequence
  Synthetic
caaaaacacuuaggcauuug

SEQ ID NO: 812314 - RNA, 20 nt, Artificial Sequence
  Synthetic
cggugcuuccacugcauuug

SEQ ID NO: 812315 - RNA, 20 nt, Artificial Sequence
  Synthetic
auauuuuuagacugcauuug

SEQ ID NO: 812316 - RNA, 20 nt, Artificial Sequence
  Synthetic
aucaauaaaaggugcauuug

SEQ ID NO: 812317 - RNA, 20 nt, Artificial Sequence
  Synthetic
ugagaaugcacuugcauuug

SEQ ID NO: 812318 - RNA, 20 nt, Artificial Sequence
  Synthetic
uaaauggauauuugcauuug

SEQ ID NO: 812319 - RNA, 20 nt, Artificial Sequence
  Synthetic
uaauuaguagaaaucauuug

SEQ ID NO: 812320 - RNA, 20 nt, Artificial Sequence
  Synthetic
caaggcgggcacaucauuug

SEQ ID NO: 812321 - RNA, 20 nt, Artificial Sequence
  Synthetic
cgaggcaggcagaucauuug

SEQ ID NO: 812322 - RNA, 20 nt, Artificial Sequence
  Synthetic
uuucuaaguaaacucauuug

SEQ ID NO: 812323 - RNA, 20 nt, Artificial Sequence
  Synthetic
uggccauuuuaauucauuug

SEQ ID NO: 812324 - RNA, 20 nt, Artificial Sequence
  Synthetic
cauguguuaagauucauuug

SEQ ID NO: 812325 - RNA, 20 nt, Artificial Sequence
  Synthetic
ugcacauccacaaagauuug

SEQ ID NO: 812326 - RNA, 20 nt, Artificial Sequence
  Synthetic
uggaaauggcagaagauuug

SEQ ID NO: 812327 - RNA, 20 nt, Artificial Sequence
  Synthetic
aacugagacagugagauuug

SEQ ID NO: 812328 - RNA, 20 nt, Artificial Sequence
  Synthetic
uucuaauagcaauagauuug

SEQ ID NO: 812329 - RNA, 20 nt, Artificial Sequence
  Synthetic
uaguuucaagccuagauuug

SEQ ID NO: 812330 - RNA, 20 nt, Artificial Sequence
  Synthetic
cuauuaagccucuagauuug

SEQ ID NO: 812331 - RNA, 20 nt, Artificial Sequence
  Synthetic
uucaugagcuuugggauuug

SEQ ID NO: 812332 - RNA, 20 nt, Artificial Sequence
  Synthetic
cuaaucuccauuuggauuug

SEQ ID NO: 812333 - RNA, 20 nt, Artificial Sequence
  Synthetic
cugggcauccacaugauuug

SEQ ID NO: 812334 - RNA, 20 nt, Artificial Sequence
  Synthetic
uagcaagguacuaugauuug

SEQ ID NO: 812335 - RNA, 20 nt, Artificial Sequence
  Synthetic
uauuuuuaugcucugauuug

SEQ ID NO: 812336 - RNA, 20 nt, Artificial Sequence
  Synthetic
auguauauucuguugauuug

SEQ ID NO: 812337 - RNA, 20 nt, Artificial Sequence
  Synthetic
cauccucauugcaauauuug

SEQ ID NO: 812338 - RNA, 20 nt, Artificial Sequence
  Synthetic
aaaguuuacaucaauauuug

SEQ ID NO: 812339 - RNA, 20 nt, Artificial Sequence
  Synthetic
acaaaccauuagaauauuug

SEQ ID NO: 812340 - RNA, 20 nt, Artificial Sequence
  Synthetic
auacuccacagacauauuug

SEQ ID NO: 812341 - RNA, 20 nt, Artificial Sequence
  Synthetic
auaauaauuguacauauuug

SEQ ID NO: 812342 - RNA, 20 nt, Artificial Sequence
  Synthetic
auuauccauuuacauauuug

SEQ ID NO: 812343 - RNA, 20 nt, Artificial Sequence
  Synthetic
uuaaauuuaucucauauuug

SEQ ID NO: 812344 - RNA, 20 nt, Artificial Sequence
  Synthetic
acuaagcagacagauauuug

SEQ ID NO: 812345 - RNA, 20 nt, Artificial Sequence
  Synthetic
uucuuuuuacacgauauuug

SEQ ID NO: 812346 - RNA, 20 nt, Artificial Sequence
  Synthetic
agagagugcauggauauuug

SEQ ID NO: 812347 - RNA, 20 nt, Artificial Sequence
  Synthetic
uuuguucagguugauauuug

SEQ ID NO: 812348 - RNA, 20 nt, Artificial Sequence
  Synthetic
auaguauguauauauauuug

SEQ ID NO: 812349 - RNA, 20 nt, Artificial Sequence
  Synthetic
ugguugaguagguauauuug

SEQ ID NO: 812350 - RNA, 20 nt, Artificial Sequence
  Synthetic
augcaucaaaaaacuauuug

SEQ ID NO: 812351 - RNA, 20 nt, Artificial Sequence
  Synthetic
uagugaaauguaacuauuug

SEQ ID NO: 812352 - RNA, 20 nt, Artificial Sequence
  Synthetic
uucuggauauccacuauuug

SEQ ID NO: 812353 - RNA, 20 nt, Artificial Sequence
  Synthetic
ccuucacccaacccuauuug

SEQ ID NO: 812354 - RNA, 20 nt, Artificial Sequence
  Synthetic
uccaggucucauucuauuug

SEQ ID NO: 812355 - RNA, 20 nt, Artificial Sequence
  Synthetic
aaagcaguuuauucuauuug

SEQ ID NO: 812356 - RNA, 20 nt, Artificial Sequence
  Synthetic
cuucguguuuauucuauuug

SEQ ID NO: 812357 - RNA, 20 nt, Artificial Sequence
  Synthetic
aauaaaauuauuucuauuug

SEQ ID NO: 812358 - RNA, 20 nt, Artificial Sequence
  Synthetic
cuugggcacaacaguauuug

SEQ ID NO: 812359 - RNA, 20 nt, Artificial Sequence
  Synthetic
aacuaauaagauaguauuug

SEQ ID NO: 812360 - RNA, 20 nt, Artificial Sequence
  Synthetic
ucaaggaaauauaguauuug

SEQ ID NO: 812361 - RNA, 20 nt, Artificial Sequence
  Synthetic
aauauuauuccuaguauuug

SEQ ID NO: 812362 - RNA, 20 nt, Artificial Sequence
  Synthetic
cacaauagaguuaguauuug

SEQ ID NO: 812363 - RNA, 20 nt, Artificial Sequence
  Synthetic
cagguagcacuggguauuug

SEQ ID NO: 812364 - RNA, 20 nt, Artificial Sequence
  Synthetic
uagaaaacuguugguauuug

SEQ ID NO: 812365 - RNA, 20 nt, Artificial Sequence
  Synthetic
aacauauaaagauguauuug

SEQ ID NO: 812366 - RNA, 20 nt, Artificial Sequence
  Synthetic
ucagauuccauuuguauuug

SEQ ID NO: 812367 - RNA, 20 nt, Artificial Sequence
  Synthetic
aacuuacuguaaauuauuug

SEQ ID NO: 812368 - RNA, 20 nt, Artificial Sequence
  Synthetic
caaacauaagcaauuauuug

SEQ ID NO: 812369 - RNA, 20 nt, Artificial Sequence
  Synthetic
ugcauguucucacuuauuug

SEQ ID NO: 812370 - RNA, 20 nt, Artificial Sequence
  Synthetic
augacucacaaccuuauuug

SEQ ID NO: 812371 - RNA, 20 nt, Artificial Sequence
  Synthetic
uuaauguauucccuuauuug

SEQ ID NO: 812372 - RNA, 20 nt, Artificial Sequence
  Synthetic
ugccaccaacagcuuauuug

SEQ ID NO: 812373 - RNA, 20 nt, Artificial Sequence
  Synthetic
cuugucucugcucuuauuug

SEQ ID NO: 812374 - RNA, 20 nt, Artificial Sequence
  Synthetic
aaacauuuaccauuuauuug

SEQ ID NO: 812375 - RNA, 20 nt, Artificial Sequence
  Synthetic
cacacguucucauuuauuug

SEQ ID NO: 812376 - RNA, 20 nt, Artificial Sequence
  Synthetic
aagagcaagugauuuauuug

SEQ ID NO: 812377 - RNA, 20 nt, Artificial Sequence
  Synthetic
ccucacaugauauuuauuug

SEQ ID NO: 812378 - RNA, 20 nt, Artificial Sequence
  Synthetic
ccucacauacacuuuauuug

SEQ ID NO: 812379 - RNA, 20 nt, Artificial Sequence
  Synthetic
aagugaauguacuuuauuug

SEQ ID NO: 812380 - RNA, 20 nt, Artificial Sequence
  Synthetic
aaaugagcccuuuuuauuug

SEQ ID NO: 812381 - RNA, 20 nt, Artificial Sequence
  Synthetic
auaugagauggcaaacuuug

SEQ ID NO: 812382 - RNA, 20 nt, Artificial Sequence
  Synthetic
cauauuucccaccaacuuug

SEQ ID NO: 812383 - RNA, 20 nt, Artificial Sequence
  Synthetic
agauggcaaaaggaacuuug

SEQ ID NO: 812384 - RNA, 20 nt, Artificial Sequence
  Synthetic
uuguuuguuuuugaacuuug

SEQ ID NO: 812385 - RNA, 20 nt, Artificial Sequence
  Synthetic
uguacuuccuaauaacuuug

SEQ ID NO: 812386 - RNA, 20 nt, Artificial Sequence
  Synthetic
uauaacuucacauaacuuug

SEQ ID NO: 812387 - RNA, 20 nt, Artificial Sequence
  Synthetic
uaugcuauaucauaacuuug

SEQ ID NO: 812388 - RNA, 20 nt, Artificial Sequence
  Synthetic
cacagcucaaguuaacuuug

SEQ ID NO: 812389 - RNA, 20 nt, Artificial Sequence
  Synthetic
aaaguucucuguuaacuuug

SEQ ID NO: 812390 - RNA, 20 nt, Artificial Sequence
  Synthetic
uuucucuagcuuuaacuuug

SEQ ID NO: 812391 - RNA, 20 nt, Artificial Sequence
  Synthetic
ccuguaaucccaacacuuug

SEQ ID NO: 812392 - RNA, 20 nt, Artificial Sequence
  Synthetic
aacuaaaugauuacacuuug

SEQ ID NO: 812393 - RNA, 20 nt, Artificial Sequence
  Synthetic
uuaauaacauccccacuuug

SEQ ID NO: 812394 - RNA, 20 nt, Artificial Sequence
  Synthetic
ccuguaaucccagcacuuug

SEQ ID NO: 812395 - RNA, 20 nt, Artificial Sequence
  Synthetic
aaauguaguuuaucacuuug

SEQ ID NO: 812396 - RNA, 20 nt, Artificial Sequence
  Synthetic
ucagccugucucucacuuug

SEQ ID NO: 812397 - RNA, 20 nt, Artificial Sequence
  Synthetic
cuaaauuuauuaagacuuug

SEQ ID NO: 812398 - RNA, 20 nt, Artificial Sequence
  Synthetic
agaaaaggacugagacuuug

SEQ ID NO: 812399 - RNA, 20 nt, Artificial Sequence
  Synthetic
aguaaauauuuuagacuuug

SEQ ID NO: 812400 - RNA, 20 nt, Artificial Sequence
  Synthetic
auguaauacauuggacuuug

SEQ ID NO: 812401 - RNA, 20 nt, Artificial Sequence
  Synthetic
aacacucaucaaugacuuug

SEQ ID NO: 812402 - RNA, 20 nt, Artificial Sequence
  Synthetic
uaaaaaguuuugugacuuug

SEQ ID NO: 812403 - RNA, 20 nt, Artificial Sequence
  Synthetic
cauuaauaaaucuuacuuug

SEQ ID NO: 812404 - RNA, 20 nt, Artificial Sequence
  Synthetic
uaauccuuuaaguuacuuug

SEQ ID NO: 812405 - RNA, 20 nt, Artificial Sequence
  Synthetic
cugauauuggauaaccuuug

SEQ ID NO: 812406 - RNA, 20 nt, Artificial Sequence
  Synthetic
uuagaaucugagcaccuuug

SEQ ID NO: 812407 - RNA, 20 nt, Artificial Sequence
  Synthetic
auauuauuaaaauaccuuug

SEQ ID NO: 812408 - RNA, 20 nt, Artificial Sequence
  Synthetic
cauugucuucuuuaccuuug

SEQ ID NO: 812409 - RNA, 20 nt, Artificial Sequence
  Synthetic
auauuucccugaccccuuug

SEQ ID NO: 812410 - RNA, 20 nt, Artificial Sequence
  Synthetic
caaaaaagagcuccccuuug

SEQ ID NO: 812411 - RNA, 20 nt, Artificial Sequence
  Synthetic
aggcauuauccaucccuuug

SEQ ID NO: 812412 - RNA, 20 nt, Artificial Sequence
  Synthetic
cuccuaauucccucccuuug

SEQ ID NO: 812413 - RNA, 20 nt, Artificial Sequence
  Synthetic
uauuuaagaaugucccuuug

SEQ ID NO: 812414 - RNA, 20 nt, Artificial Sequence
  Synthetic
uuuguaaaaaacagccuuug

SEQ ID NO: 812415 - RNA, 20 nt, Artificial Sequence
  Synthetic
uugauacccuacagccuuug

SEQ ID NO: 812416 - RNA, 20 nt, Artificial Sequence
  Synthetic
cagauuguggagggccuuug

SEQ ID NO: 812417 - RNA, 20 nt, Artificial Sequence
  Synthetic
agauucuguccuugccuuug

SEQ ID NO: 812418 - RNA, 20 nt, Artificial Sequence
  Synthetic
cccuaugucuuccuccuuug

SEQ ID NO: 812419 - RNA, 20 nt, Artificial Sequence
  Synthetic
uaaaaauuaucucuccuuug

SEQ ID NO: 812420 - RNA, 20 nt, Artificial Sequence
  Synthetic
auagcuaauauuguccuuug

SEQ ID NO: 812421 - RNA, 20 nt, Artificial Sequence
  Synthetic
uaaaaacuagaauuccuuug

SEQ ID NO: 812422 - RNA, 20 nt, Artificial Sequence
  Synthetic
uucacccuuacguuccuuug

SEQ ID NO: 812423 - RNA, 20 nt, Artificial Sequence
  Synthetic
aaauaaaaacuuuuccuuug

SEQ ID NO: 812424 - RNA, 20 nt, Artificial Sequence
  Synthetic
auaaauacugucaagcuuug

SEQ ID NO: 812425 - RNA, 20 nt, Artificial Sequence
  Synthetic
uuugaaacucugaagcuuug

SEQ ID NO: 812426 - RNA, 20 nt, Artificial Sequence
  Synthetic
aauauacaauagcagcuuug

SEQ ID NO: 812427 - RNA, 20 nt, Artificial Sequence
  Synthetic
agcauuucuagugagcuuug

SEQ ID NO: 812428 - RNA, 20 nt, Artificial Sequence
  Synthetic
aaaagcugagguuagcuuug

SEQ ID NO: 812429 - RNA, 20 nt, Artificial Sequence
  Synthetic
cuggccacuuguuagcuuug

SEQ ID NO: 812430 - RNA, 20 nt, Artificial Sequence
  Synthetic
uuucaaucaaauacgcuuug

SEQ ID NO: 812431 - RNA, 20 nt, Artificial Sequence
  Synthetic
aacaaauauuucaggcuuug

SEQ ID NO: 812432 - RNA, 20 nt, Artificial Sequence
  Synthetic
aguaaauauuauaggcuuug

SEQ ID NO: 812433 - RNA, 20 nt, Artificial Sequence
  Synthetic
auaagauuuuuggggcuuug

SEQ ID NO: 812434 - RNA, 20 nt, Artificial Sequence
  Synthetic
ucuuaagugugugggcuuug

SEQ ID NO: 812435 - RNA, 20 nt, Artificial Sequence
  Synthetic
uguuuaaaaaaauggcuuug

SEQ ID NO: 812436 - RNA, 20 nt, Artificial Sequence
  Synthetic
aaagaacagaaauggcuuug

SEQ ID NO: 812437 - RNA, 20 nt, Artificial Sequence
  Synthetic
caagguguuuuguggcuuug

SEQ ID NO: 812438 - RNA, 20 nt, Artificial Sequence
  Synthetic
acuaaaugccuuuggcuuug

SEQ ID NO: 812439 - RNA, 20 nt, Artificial Sequence
  Synthetic
aucuaaaaucagaugcuuug

SEQ ID NO: 812440 - RNA, 20 nt, Artificial Sequence
  Synthetic
acagaguggaaacugcuuug

SEQ ID NO: 812441 - RNA, 20 nt, Artificial Sequence
  Synthetic
ugcuauuucucccugcuuug

SEQ ID NO: 812442 - RNA, 20 nt, Artificial Sequence
  Synthetic
ccaagaauauuccugcuuug

SEQ ID NO: 812443 - RNA, 20 nt, Artificial Sequence
  Synthetic
cacagggccgugcugcuuug

SEQ ID NO: 812444 - RNA, 20 nt, Artificial Sequence
  Synthetic
uccuaugugcuugugcuuug

SEQ ID NO: 812445 - RNA, 20 nt, Artificial Sequence
  Synthetic
ccaguuaggguugugcuuug

SEQ ID NO: 812446 - RNA, 20 nt, Artificial Sequence
  Synthetic
uauuauaaguuugugcuuug

SEQ ID NO: 812447 - RNA, 20 nt, Artificial Sequence
  Synthetic
ugggugugaaaauugcuuug

SEQ ID NO: 812448 - RNA, 20 nt, Artificial Sequence
  Synthetic
cucaauuagaccuugcuuug

SEQ ID NO: 812449 - RNA, 20 nt, Artificial Sequence
  Synthetic
uuugaaaucgaaaaucuuug

SEQ ID NO: 812450 - RNA, 20 nt, Artificial Sequence
  Synthetic
uugaucaggacaaaucuuug

SEQ ID NO: 812451 - RNA, 20 nt, Artificial Sequence
  Synthetic
aguaauacuagaaaucuuug

SEQ ID NO: 812452 - RNA, 20 nt, Artificial Sequence
  Synthetic
uuguugacauaacaucuuug

SEQ ID NO: 812453 - RNA, 20 nt, Artificial Sequence
  Synthetic
aaaaucaaaucucaucuuug

SEQ ID NO: 812454 - RNA, 20 nt, Artificial Sequence
  Synthetic
uuucugguucuagaucuuug

SEQ ID NO: 812455 - RNA, 20 nt, Artificial Sequence
  Synthetic
aauuccaaaccauaucuuug

SEQ ID NO: 812456 - RNA, 20 nt, Artificial Sequence
  Synthetic
agacauagucccuaucuuug

SEQ ID NO: 812457 - RNA, 20 nt, Artificial Sequence
  Synthetic
uuuugcauaaaguaucuuug

SEQ ID NO: 812458 - RNA, 20 nt, Artificial Sequence
  Synthetic
cuucucaaggaguaucuuug

SEQ ID NO: 812459 - RNA, 20 nt, Artificial Sequence
  Synthetic
cuucucgaggaguaucuuug

SEQ ID NO: 812460 - RNA, 20 nt, Artificial Sequence
  Synthetic
uauauguuucuuccucuuug

SEQ ID NO: 812461 - RNA, 20 nt, Artificial Sequence
  Synthetic
ccuguaaucccagcucuuug

SEQ ID NO: 812462 - RNA, 20 nt, Artificial Sequence
  Synthetic
uuccaggccuccucucuuug

SEQ ID NO: 812463 - RNA, 20 nt, Artificial Sequence
  Synthetic
cccagauuuuuuucucuuug

SEQ ID NO: 812464 - RNA, 20 nt, Artificial Sequence
  Synthetic
cauaaggcauaaagucuuug

SEQ ID NO: 812465 - RNA, 20 nt, Artificial Sequence
  Synthetic
cuucuuuuucuaagucuuug

SEQ ID NO: 812466 - RNA, 20 nt, Artificial Sequence
  Synthetic
aguuggguagaaggucuuug

SEQ ID NO: 812467 - RNA, 20 nt, Artificial Sequence
  Synthetic
cccacugucaguggucuuug

SEQ ID NO: 812468 - RNA, 20 nt, Artificial Sequence
  Synthetic
caaggaaugagaugucuuug

SEQ ID NO: 812469 - RNA, 20 nt, Artificial Sequence
  Synthetic
uguauggauggaugucuuug

SEQ ID NO: 812470 - RNA, 20 nt, Artificial Sequence
  Synthetic
uaacuggcuggcugucuuug

SEQ ID NO: 812471 - RNA, 20 nt, Artificial Sequence
  Synthetic
uuuauaucauaaauucuuug

SEQ ID NO: 812472 - RNA, 20 nt, Artificial Sequence
  Synthetic
uuucagcucuaaauucuuug

SEQ ID NO: 812473 - RNA, 20 nt, Artificial Sequence
  Synthetic
aagguagauuaaauucuuug

SEQ ID NO: 812474 - RNA, 20 nt, Artificial Sequence
  Synthetic
ucgacaguguucauucuuug

SEQ ID NO: 812475 - RNA, 20 nt, Artificial Sequence
  Synthetic
ugaggcuaguauauucuuug

SEQ ID NO: 812476 - RNA, 20 nt, Artificial Sequence
  Synthetic
accuccuauagaguucuuug

SEQ ID NO: 812477 - RNA, 20 nt, Artificial Sequence
  Synthetic
uuuuuaaacuugguucuuug

SEQ ID NO: 812478 - RNA, 20 nt, Artificial Sequence
  Synthetic
caacuucuuuauuuucuuug

SEQ ID NO: 812479 - RNA, 20 nt, Artificial Sequence
  Synthetic
uagcuuugcucuuuucuuug

SEQ ID NO: 812480 - RNA, 20 nt, Artificial Sequence
  Synthetic
ccaccaccugaaaaaguuug

SEQ ID NO: 812481 - RNA, 20 nt, Artificial Sequence
  Synthetic
ucugaaauguuaaaaguuug

SEQ ID NO: 812482 - RNA, 20 nt, Artificial Sequence
  Synthetic
aauaaaaauggcaaaguuug

SEQ ID NO: 812483 - RNA, 20 nt, Artificial Sequence
  Synthetic
uuuuguaaauugaaaguuug

SEQ ID NO: 812484 - RNA, 20 nt, Artificial Sequence
  Synthetic
uaauuacccauagaaguuug

SEQ ID NO: 812485 - RNA, 20 nt, Artificial Sequence
  Synthetic
ccuuggcagccauaaguuug

SEQ ID NO: 812486 - RNA, 20 nt, Artificial Sequence
  Synthetic
acuuuaggacacuaaguuug

SEQ ID NO: 812487 - RNA, 20 nt, Artificial Sequence
  Synthetic
agcguguuuguuuaaguuug

SEQ ID NO: 812488 - RNA, 20 nt, Artificial Sequence
  Synthetic
aauuauuugccuacaguuug

SEQ ID NO: 812489 - RNA, 20 nt, Artificial Sequence
  Synthetic
ugguuaagucauccaguuug

SEQ ID NO: 812490 - RNA, 20 nt, Artificial Sequence
  Synthetic
ccacuguggaaagcaguuug

SEQ ID NO: 812491 - RNA, 20 nt, Artificial Sequence
  Synthetic
uuuguggggagugcaguuug

SEQ ID NO: 812492 - RNA, 20 nt, Artificial Sequence
  Synthetic
ugaaucauaaacucaguuug

SEQ ID NO: 812493 - RNA, 20 nt, Artificial Sequence
  Synthetic
aaguguuguuugucaguuug

SEQ ID NO: 812494 - RNA, 20 nt, Artificial Sequence
  Synthetic
auuauuuagugaagaguuug

SEQ ID NO: 812495 - RNA, 20 nt, Artificial Sequence
  Synthetic
auaaguugcaaaggaguuug

SEQ ID NO: 812496 - RNA, 20 nt, Artificial Sequence
  Synthetic
cgcuugagcccaggaguuug

SEQ ID NO: 812497 - RNA, 20 nt, Artificial Sequence
  Synthetic
ugcuugagcucaggaguuug

SEQ ID NO: 812498 - RNA, 20 nt, Artificial Sequence
  Synthetic
cccagauacuugggaguuug

SEQ ID NO: 812499 - RNA, 20 nt, Artificial Sequence
  Synthetic
uccauggaaauuugaguuug

SEQ ID NO: 812500 - RNA, 20 nt, Artificial Sequence
  Synthetic
auauauggacucauaguuug

SEQ ID NO: 812501 - RNA, 20 nt, Artificial Sequence
  Synthetic
aggauacaaggcuuaguuug

SEQ ID NO: 812502 - RNA, 20 nt, Artificial Sequence
  Synthetic
uguaguaguuucuuaguuug

SEQ ID NO: 812503 - RNA, 20 nt, Artificial Sequence
  Synthetic
aauguuauuuuuaacguuug

SEQ ID NO: 812504 - RNA, 20 nt, Artificial Sequence
  Synthetic
augaauuacucucacguuug

SEQ ID NO: 812505 - RNA, 20 nt, Artificial Sequence
  Synthetic
uggcuauuuggagucguuug

SEQ ID NO: 812506 - RNA, 20 nt, Artificial Sequence
  Synthetic
aauacaccuugugucguuug

SEQ ID NO: 812507 - RNA, 20 nt, Artificial Sequence
  Synthetic
ucccaaggugaaaagguuug

SEQ ID NO: 812508 - RNA, 20 nt, Artificial Sequence
  Synthetic
auuuccuuuuuaaagguuug

SEQ ID NO: 812509 - RNA, 20 nt, Artificial Sequence
  Synthetic
cauuaccuaaagaagguuug

SEQ ID NO: 812510 - RNA, 20 nt, Artificial Sequence
  Synthetic
agggauuauuguaagguuug

SEQ ID NO: 812511 - RNA, 20 nt, Artificial Sequence
  Synthetic
uacacagcagcacagguuug

SEQ ID NO: 812512 - RNA, 20 nt, Artificial Sequence
  Synthetic
augaaggacuggcagguuug

SEQ ID NO: 812513 - RNA, 20 nt, Artificial Sequence
  Synthetic
auaauaaauucugagguuug

SEQ ID NO: 812514 - RNA, 20 nt, Artificial Sequence
  Synthetic
cauuuguaaagugagguuug

SEQ ID NO: 812515 - RNA, 20 nt, Artificial Sequence
  Synthetic
cuccuuucagcauagguuug

SEQ ID NO: 812516 - RNA, 20 nt, Artificial Sequence
  Synthetic
uaacuuuuauuuuagguuug

SEQ ID NO: 812517 - RNA, 20 nt, Artificial Sequence
  Synthetic
auaaaacugccuaggguuug

SEQ ID NO: 812518 - RNA, 20 nt, Artificial Sequence
  Synthetic
agcagcugaacagggguuug

SEQ ID NO: 812519 - RNA, 20 nt, Artificial Sequence
  Synthetic
uuguuuguuugggggguuug

SEQ ID NO: 812520 - RNA, 20 nt, Artificial Sequence
  Synthetic
uauuagaagguggggguuug

SEQ ID NO: 812521 - RNA, 20 nt, Artificial Sequence
  Synthetic
ugaagauuagcugggguuug

SEQ ID NO: 812522 - RNA, 20 nt, Artificial Sequence
  Synthetic
uguaguaguuucaugguuug

SEQ ID NO: 812523 - RNA, 20 nt, Artificial Sequence
  Synthetic
cucuuguuggcuaugguuug

SEQ ID NO: 812524 - RNA, 20 nt, Artificial Sequence
  Synthetic
cuugaaaauguuaugguuug

SEQ ID NO: 812525 - RNA, 20 nt, Artificial Sequence
  Synthetic
uaugcugcccagcugguuug

SEQ ID NO: 812526 - RNA, 20 nt, Artificial Sequence
  Synthetic
uaaauuacaugcuugguuug

SEQ ID NO: 812527 - RNA, 20 nt, Artificial Sequence
  Synthetic
aaaauauauuuguugguuug

SEQ ID NO: 812528 - RNA, 20 nt, Artificial Sequence
  Synthetic
acugaaguaguuuugguuug

SEQ ID NO: 812529 - RNA, 20 nt, Artificial Sequence
  Synthetic
ugccagagacaaaauguuug

SEQ ID NO: 812530 - RNA, 20 nt, Artificial Sequence
  Synthetic
agagaaauuauaaauguuug

SEQ ID NO: 812531 - RNA, 20 nt, Artificial Sequence
  Synthetic
aaauaaaugguaaauguuug

SEQ ID NO: 812532 - RNA, 20 nt, Artificial Sequence
  Synthetic
aaagcaaugguaaauguuug

SEQ ID NO: 812533 - RNA, 20 nt, Artificial Sequence
  Synthetic
aacuccaacuggaauguuug

SEQ ID NO: 812534 - RNA, 20 nt, Artificial Sequence
  Synthetic
agaccaagaaguaauguuug

SEQ ID NO: 812535 - RNA, 20 nt, Artificial Sequence
  Synthetic
aaaugucuacuacauguuug

SEQ ID NO: 812536 - RNA, 20 nt, Artificial Sequence
  Synthetic
uuauuucacgcagauguuug

SEQ ID NO: 812537 - RNA, 20 nt, Artificial Sequence
  Synthetic
caguuuaauaaugauguuug

SEQ ID NO: 812538 - RNA, 20 nt, Artificial Sequence
  Synthetic
cguaauguauuauauguuug

SEQ ID NO: 812539 - RNA, 20 nt, Artificial Sequence
  Synthetic
agaaauaccuuaacuguuug

SEQ ID NO: 812540 - RNA, 20 nt, Artificial Sequence
  Synthetic
ccgaacccucacacuguuug

SEQ ID NO: 812541 - RNA, 20 nt, Artificial Sequence
  Synthetic
uccuauaugggcacuguuug

SEQ ID NO: 812542 - RNA, 20 nt, Artificial Sequence
  Synthetic
uaacaagcagguaguguuug

SEQ ID NO: 812543 - RNA, 20 nt, Artificial Sequence
  Synthetic
uuuuguguugauuguguuug

SEQ ID NO: 812544 - RNA, 20 nt, Artificial Sequence
  Synthetic
agaaugcacccaauuguuug

SEQ ID NO: 812545 - RNA, 20 nt, Artificial Sequence
  Synthetic
ugucugcuaaacauuguuug

SEQ ID NO: 812546 - RNA, 20 nt, Artificial Sequence
  Synthetic
ccuaacccucacauuguuug

SEQ ID NO: 812547 - RNA, 20 nt, Artificial Sequence
  Synthetic
uaaggugggaggauuguuug

SEQ ID NO: 812548 - RNA, 20 nt, Artificial Sequence
  Synthetic
uuuuuaugcuuuauuguuug

SEQ ID NO: 812549 - RNA, 20 nt, Artificial Sequence
  Synthetic
aauguucuuccauuuguuug

SEQ ID NO: 812550 - RNA, 20 nt, Artificial Sequence
  Synthetic
uuuucugaaagcuuuguuug

SEQ ID NO: 812551 - RNA, 20 nt, Artificial Sequence
  Synthetic
uuaaccaauagguuuguuug

SEQ ID NO: 812552 - RNA, 20 nt, Artificial Sequence
  Synthetic
uucuuuuguuuguuuguuug

SEQ ID NO: 812553 - RNA, 20 nt, Artificial Sequence
  Synthetic
cuuaaauuuuuguuuguuug

SEQ ID NO: 812554 - RNA, 20 nt, Artificial Sequence
  Synthetic
cagagaaggacuuuuguuug

SEQ ID NO: 812555 - RNA, 20 nt, Artificial Sequence
  Synthetic
auuuguucuuguuuuguuug

SEQ ID NO: 812556 - RNA, 20 nt, Artificial Sequence
  Synthetic
uuuuccccuugcaaauuuug

SEQ ID NO: 812557 - RNA, 20 nt, Artificial Sequence
  Synthetic
uuguaucacauuaaauuuug

SEQ ID NO: 812558 - RNA, 20 nt, Artificial Sequence
  Synthetic
augacacugguacaauuuug

SEQ ID NO: 812559 - RNA, 20 nt, Artificial Sequence
  Synthetic
ugagaagaacaagaauuuug

SEQ ID NO: 812560 - RNA, 20 nt, Artificial Sequence
  Synthetic
cuauuggguccugaauuuug

SEQ ID NO: 812561 - RNA, 20 nt, Artificial Sequence
  Synthetic
auuuccaauuuugaauuuug

SEQ ID NO: 812562 - RNA, 20 nt, Artificial Sequence
  Synthetic
uggaaugugcuuuaauuuug

SEQ ID NO: 812563 - RNA, 20 nt, Artificial Sequence
  Synthetic
aauuucucaacaacauuuug

SEQ ID NO: 812564 - RNA, 20 nt, Artificial Sequence
  Synthetic
cccaaguauuucacauuuug

SEQ ID NO: 812565 - RNA, 20 nt, Artificial Sequence
  Synthetic
acaaauaaauguacauuuug

SEQ ID NO: 812566 - RNA, 20 nt, Artificial Sequence
  Synthetic
ugaaauacauuuacauuuug

SEQ ID NO: 812567 - RNA, 20 nt, Artificial Sequence
  Synthetic
uugaaaaguuuuacauuuug

SEQ ID NO: 812568 - RNA, 20 nt, Artificial Sequence
  Synthetic
cuacauauuguuccauuuug

SEQ ID NO: 812569 - RNA, 20 nt, Artificial Sequence
  Synthetic
auuuuaaaguacgcauuuug

SEQ ID NO: 812570 - RNA, 20 nt, Artificial Sequence
  Synthetic
uacaggugaacugcauuuug

SEQ ID NO: 812571 - RNA, 20 nt, Artificial Sequence
  Synthetic
aauccuagguuugcauuuug

SEQ ID NO: 812572 - RNA, 20 nt, Artificial Sequence
  Synthetic
auuuguuaggacucauuuug

SEQ ID NO: 812573 - RNA, 20 nt, Artificial Sequence
  Synthetic
uuccuugggucuagauuuug

SEQ ID NO: 812574 - RNA, 20 nt, Artificial Sequence
  Synthetic
augacuggcuuuagauuuug

SEQ ID NO: 812575 - RNA, 20 nt, Artificial Sequence
  Synthetic
ucugcucuugaaugauuuug

SEQ ID NO: 812576 - RNA, 20 nt, Artificial Sequence
  Synthetic
caagaacguguuugauuuug

SEQ ID NO: 812577 - RNA, 20 nt, Artificial Sequence
  Synthetic
aaauauauaaaaauauuuug

SEQ ID NO: 812578 - RNA, 20 nt, Artificial Sequence
  Synthetic
uaaugauaucagauauuuug

SEQ ID NO: 812579 - RNA, 20 nt, Artificial Sequence
  Synthetic
uucaauuuguugauauuuug

SEQ ID NO: 812580 - RNA, 20 nt, Artificial Sequence
  Synthetic
uuguugucucauauauuuug

SEQ ID NO: 812581 - RNA, 20 nt, Artificial Sequence
  Synthetic
aagagaguaguaguauuuug

SEQ ID NO: 812582 - RNA, 20 nt, Artificial Sequence
  Synthetic
cugcucuggaagguauuuug

SEQ ID NO: 812583 - RNA, 20 nt, Artificial Sequence
  Synthetic
aagcuaaaaaauguauuuug

SEQ ID NO: 812584 - RNA, 20 nt, Artificial Sequence
  Synthetic
auaagugaacuauuauuuug

SEQ ID NO: 812585 - RNA, 20 nt, Artificial Sequence
  Synthetic
cagaucuagcaguuauuuug

SEQ ID NO: 812586 - RNA, 20 nt, Artificial Sequence
  Synthetic
uguucuuugcaguuauuuug

SEQ ID NO: 812587 - RNA, 20 nt, Artificial Sequence
  Synthetic
ugagauauauaguuauuuug

SEQ ID NO: 812588 - RNA, 20 nt, Artificial Sequence
  Synthetic
uaugugaggagguuauuuug

SEQ ID NO: 812589 - RNA, 20 nt, Artificial Sequence
  Synthetic
uacacaggugaaaacuuuug

SEQ ID NO: 812590 - RNA, 20 nt, Artificial Sequence
  Synthetic
ccaaugauaucagacuuuug

SEQ ID NO: 812591 - RNA, 20 nt, Artificial Sequence
  Synthetic
ugacacaauguguacuuuug

SEQ ID NO: 812592 - RNA, 20 nt, Artificial Sequence
  Synthetic
cucuuagauugacccuuuug

SEQ ID NO: 812593 - RNA, 20 nt, Artificial Sequence
  Synthetic
auauucaggaaagccuuuug

SEQ ID NO: 812594 - RNA, 20 nt, Artificial Sequence
  Synthetic
uguauucccuaauccuuuug

SEQ ID NO: 812595 - RNA, 20 nt, Artificial Sequence
  Synthetic
cuuuuaaaucucuccuuuug

SEQ ID NO: 812596 - RNA, 20 nt, Artificial Sequence
  Synthetic
caaagacugguguccuuuug

SEQ ID NO: 812597 - RNA, 20 nt, Artificial Sequence
  Synthetic
auauuucuucuuuccuuuug

SEQ ID NO: 812598 - RNA, 20 nt, Artificial Sequence
  Synthetic
uuuuugauguuuuccuuuug

SEQ ID NO: 812599 - RNA, 20 nt, Artificial Sequence
  Synthetic
auaaaauugugcagcuuuug

SEQ ID NO: 812600 - RNA, 20 nt, Artificial Sequence
  Synthetic
aauucaaauguuagcuuuug

SEQ ID NO: 812601 - RNA, 20 nt, Artificial Sequence
  Synthetic
cccagggcacuucgcuuuug

SEQ ID NO: 812602 - RNA, 20 nt, Artificial Sequence
  Synthetic
uguuugagcaaaggcuuuug

SEQ ID NO: 812603 - RNA, 20 nt, Artificial Sequence
  Synthetic
aacucauaguuaggcuuuug

SEQ ID NO: 812604 - RNA, 20 nt, Artificial Sequence
  Synthetic
cugcagacauagggcuuuug

SEQ ID NO: 812605 - RNA, 20 nt, Artificial Sequence
  Synthetic
caaaaauuagcuggcuuuug

SEQ ID NO: 812606 - RNA, 20 nt, Artificial Sequence
  Synthetic
uuuuguuauaauugcuuuug

SEQ ID NO: 812607 - RNA, 20 nt, Artificial Sequence
  Synthetic
aauugcagguaaaucuuuug

SEQ ID NO: 812608 - RNA, 20 nt, Artificial Sequence
  Synthetic
uugugcaugcagaucuuuug

SEQ ID NO: 812609 - RNA, 20 nt, Artificial Sequence
  Synthetic
cacuauuaauuccucuuuug

SEQ ID NO: 812610 - RNA, 20 nt, Artificial Sequence
  Synthetic
ucccaaaccuugcucuuuug

SEQ ID NO: 812611 - RNA, 20 nt, Artificial Sequence
  Synthetic
acauaaugacuucucuuuug

SEQ ID NO: 812612 - RNA, 20 nt, Artificial Sequence
  Synthetic
ucucaaagagaagucuuuug

SEQ ID NO: 812613 - RNA, 20 nt, Artificial Sequence
  Synthetic
uggcuauccagggucuuuug

SEQ ID NO: 812614 - RNA, 20 nt, Artificial Sequence
  Synthetic
uacaugagggccuucuuuug

SEQ ID NO: 812615 - RNA, 20 nt, Artificial Sequence
  Synthetic
aagugcuuauuguucuuuug

SEQ ID NO: 812616 - RNA, 20 nt, Artificial Sequence
  Synthetic
auuuguagguuguucuuuug

SEQ ID NO: 812617 - RNA, 20 nt, Artificial Sequence
  Synthetic
ugugugcauauuuucuuuug

SEQ ID NO: 812618 - RNA, 20 nt, Artificial Sequence
  Synthetic
cauaacacuuuuuucuuuug

SEQ ID NO: 812619 - RNA, 20 nt, Artificial Sequence
  Synthetic
uacuauauuugcaaguuuug

SEQ ID NO: 812620 - RNA, 20 nt, Artificial Sequence
  Synthetic
uuuugaacuguuaaguuuug

SEQ ID NO: 812621 - RNA, 20 nt, Artificial Sequence
  Synthetic
aguaaauauuuuaaguuuug

SEQ ID NO: 812622 - RNA, 20 nt, Artificial Sequence
  Synthetic
aacaucagacuacaguuuug

SEQ ID NO: 812623 - RNA, 20 nt, Artificial Sequence
  Synthetic
aguuauuggucucaguuuug

SEQ ID NO: 812624 - RNA, 20 nt, Artificial Sequence
  Synthetic
uuuuaagcuacugaguuuug

SEQ ID NO: 812625 - RNA, 20 nt, Artificial Sequence
  Synthetic
caaccaaaaagauaguuuug

SEQ ID NO: 812626 - RNA, 20 nt, Artificial Sequence
  Synthetic
cauguguuuguauaguuuug

SEQ ID NO: 812627 - RNA, 20 nt, Artificial Sequence
  Synthetic
uguuacaaucacuaguuuug

SEQ ID NO: 812628 - RNA, 20 nt, Artificial Sequence
  Synthetic
uuauaauuucaguaguuuug

SEQ ID NO: 812629 - RNA, 20 nt, Artificial Sequence
  Synthetic
cuauuaguaguuacguuuug

SEQ ID NO: 812630 - RNA, 20 nt, Artificial Sequence
  Synthetic
aaaaaaaaaagaagguuuug

SEQ ID NO: 812631 - RNA, 20 nt, Artificial Sequence
  Synthetic
agaagaaguuacagguuuug

SEQ ID NO: 812632 - RNA, 20 nt, Artificial Sequence
  Synthetic
ucaugguggcgaugguuuug

SEQ ID NO: 812633 - RNA, 20 nt, Artificial Sequence
  Synthetic
ugucaguuguucugguuuug

SEQ ID NO: 812634 - RNA, 20 nt, Artificial Sequence
  Synthetic
caacacugucauauguuuug

SEQ ID NO: 812635 - RNA, 20 nt, Artificial Sequence
  Synthetic
aauucuauuuuuauguuuug

SEQ ID NO: 812636 - RNA, 20 nt, Artificial Sequence
  Synthetic
ucaaacuauccucuguuuug

SEQ ID NO: 812637 - RNA, 20 nt, Artificial Sequence
  Synthetic
cuucauuuccaaguguuuug

SEQ ID NO: 812638 - RNA, 20 nt, Artificial Sequence
  Synthetic
cucuagauuucuguguuuug

SEQ ID NO: 812639 - RNA, 20 nt, Artificial Sequence
  Synthetic
uaguguauugaauuguuuug

SEQ ID NO: 812640 - RNA, 20 nt, Artificial Sequence
  Synthetic
uauacuucaagguuguuuug

SEQ ID NO: 812641 - RNA, 20 nt, Artificial Sequence
  Synthetic
aucaguguaggguuguuuug

SEQ ID NO: 812642 - RNA, 20 nt, Artificial Sequence
  Synthetic
uggcuuccacuguuguuuug

SEQ ID NO: 812643 - RNA, 20 nt, Artificial Sequence
  Synthetic
uuucauaagauuuuguuuug

SEQ ID NO: 812644 - RNA, 20 nt, Artificial Sequence
  Synthetic
caagguaagauuuuguuuug

SEQ ID NO: 812645 - RNA, 20 nt, Artificial Sequence
  Synthetic
acagccuguguuuuguuuug

SEQ ID NO: 812646 - RNA, 20 nt, Artificial Sequence
  Synthetic
aaaauuuuuuuaaauuuuug

SEQ ID NO: 812647 - RNA, 20 nt, Artificial Sequence
  Synthetic
cuuuuuuauuuuaauuuuug

SEQ ID NO: 812648 - RNA, 20 nt, Artificial Sequence
  Synthetic
uuuuuaauuuuuaauuuuug

SEQ ID NO: 812649 - RNA, 20 nt, Artificial Sequence
  Synthetic
uaacgugaugaacauuuuug

SEQ ID NO: 812650 - RNA, 20 nt, Artificial Sequence
  Synthetic
ucaaauacuucucauuuuug

SEQ ID NO: 812651 - RNA, 20 nt, Artificial Sequence
  Synthetic
augcugaaauaagauuuuug

SEQ ID NO: 812652 - RNA, 20 nt, Artificial Sequence
  Synthetic
aucacccccacagauuuuug

SEQ ID NO: 812653 - RNA, 20 nt, Artificial Sequence
  Synthetic
uuaugagcuacauauuuuug

SEQ ID NO: 812654 - RNA, 20 nt, Artificial Sequence
  Synthetic
caucacuuagcauauuuuug

SEQ ID NO: 812655 - RNA, 20 nt, Artificial Sequence
  Synthetic
acuguaguaugauauuuuug

SEQ ID NO: 812656 - RNA, 20 nt, Artificial Sequence
  Synthetic
cucauugaauaguauuuuug

SEQ ID NO: 812657 - RNA, 20 nt, Artificial Sequence
  Synthetic
aaaaucuauacuuauuuuug

SEQ ID NO: 812658 - RNA, 20 nt, Artificial Sequence
  Synthetic
acaagggaaucuuauuuuug

SEQ ID NO: 812659 - RNA, 20 nt, Artificial Sequence
  Synthetic
aggaaaaauccaacuuuuug

SEQ ID NO: 812660 - RNA, 20 nt, Artificial Sequence
  Synthetic
auuugacaguaaccuuuuug

SEQ ID NO: 812661 - RNA, 20 nt, Artificial Sequence
  Synthetic
aacuaagcauguccuuuuug

SEQ ID NO: 812662 - RNA, 20 nt, Artificial Sequence
  Synthetic
augguaagauuuccuuuuug

SEQ ID NO: 812663 - RNA, 20 nt, Artificial Sequence
  Synthetic
auaacgcuuucugcuuuuug

SEQ ID NO: 812664 - RNA, 20 nt, Artificial Sequence
  Synthetic
caacuauuucucucuuuuug

SEQ ID NO: 812665 - RNA, 20 nt, Artificial Sequence
  Synthetic
uuggugaucaucaguuuuug

SEQ ID NO: 812666 - RNA, 20 nt, Artificial Sequence
  Synthetic
aaaauuucagucaguuuuug

SEQ ID NO: 812667 - RNA, 20 nt, Artificial Sequence
  Synthetic
aaauagaacgucaguuuuug

SEQ ID NO: 812668 - RNA, 20 nt, Artificial Sequence
  Synthetic
aauauuucugcagguuuuug

SEQ ID NO: 812669 - RNA, 20 nt, Artificial Sequence
  Synthetic
uuccuaaaauaauguuuuug

SEQ ID NO: 812670 - RNA, 20 nt, Artificial Sequence
  Synthetic
aauuaauguagauguuuuug

SEQ ID NO: 812671 - RNA, 20 nt, Artificial Sequence
  Synthetic
uauagggggcuauguuuuug

SEQ ID NO: 812672 - RNA, 20 nt, Artificial Sequence
  Synthetic
ugcaccacuguguguuuuug

SEQ ID NO: 812673 - RNA, 20 nt, Artificial Sequence
  Synthetic
augauuucgaaaauuuuuug

SEQ ID NO: 812674 - RNA, 20 nt, Artificial Sequence
  Synthetic
uuagguuugauaauuuuuug

SEQ ID NO: 812675 - RNA, 20 nt, Artificial Sequence
  Synthetic
uuuuuauuuuuaauuuuuug

SEQ ID NO: 812676 - RNA, 20 nt, Artificial Sequence
  Synthetic
caaaauaccuccauuuuuug

SEQ ID NO: 812677 - RNA, 20 nt, Artificial Sequence
  Synthetic
uacauacuuauuauuuuuug

SEQ ID NO: 812678 - RNA, 20 nt, Artificial Sequence
  Synthetic
ccuagauauuuuauuuuuug

SEQ ID NO: 812679 - RNA, 20 nt, Artificial Sequence
  Synthetic
aauucuauuuuuauuuuuug

SEQ ID NO: 812680 - RNA, 20 nt, Artificial Sequence
  Synthetic
cagaaucucauucuuuuuug

SEQ ID NO: 812681 - RNA, 20 nt, Artificial Sequence
  Synthetic
augauuuucuuucuuuuuug

SEQ ID NO: 812682 - RNA, 20 nt, Artificial Sequence
  Synthetic
aauuaauucucaguuuuuug

SEQ ID NO: 812683 - RNA, 20 nt, Artificial Sequence
  Synthetic
auucuguuuucaguuuuuug

SEQ ID NO: 812684 - RNA, 20 nt, Artificial Sequence
  Synthetic
aauucuauuuguguuuuuug

SEQ ID NO: 812685 - RNA, 20 nt, Artificial Sequence
  Synthetic
caacuuaaauuuguuuuuug

SEQ ID NO: 812686 - RNA, 20 nt, Artificial Sequence
  Synthetic
uaauuuuuaaaauuuuuuug

SEQ ID NO: 812687 - RNA, 20 nt, Artificial Sequence
  Synthetic
auacaauuuacauuuuuuug

SEQ ID NO: 812688 - RNA, 20 nt, Artificial Sequence
  Synthetic
ccucacauacuauuuuuuug

SEQ ID NO: 812689 - RNA, 20 nt, Artificial Sequence
  Synthetic
uuauauuuuuuauuuuuuug

SEQ ID NO: 812690 - RNA, 20 nt, Artificial Sequence
  Synthetic
uuugguuucuccuuuuuuug

SEQ ID NO: 812691 - RNA, 20 nt, Artificial Sequence
  Synthetic
aggauuuccuucuuuuuuug

SEQ ID NO: 812692 - RNA, 20 nt, Artificial Sequence
  Synthetic
uuucaggguuaguuuuuuug

SEQ ID NO: 812693 - RNA, 20 nt, Artificial Sequence
  Synthetic
uguuauuguuaguuuuuuug

SEQ ID NO: 812694 - RNA, 20 nt, Artificial Sequence
  Synthetic
uaggaugccucuuuuuuuug

SEQ ID NO: 812695 - RNA, 20 nt, Artificial Sequence
  Synthetic
agaacacuaaguuuuuuuug

SEQ ID NO: 812696 - RNA, 20 nt, Artificial Sequence
  Synthetic
uuuguuuuuuuuuuuuuuug

SEQ ID NO: 812697 - RNA, 20 nt, Artificial Sequence
  Synthetic
uuuuuuuuuuuuuuuuuuug

SEQ ID NO: 812698 - RNA, 20 nt, Artificial Sequence
  Synthetic
uaaacaaaaaaaaaaaaaau

SEQ ID NO: 812699 - RNA, 20 nt, Artificial Sequence
  Synthetic
caaaaaagaaaaaaaaaaau

SEQ ID NO: 812700 - RNA, 20 nt, Artificial Sequence
  Synthetic
aggaaugagaaaaaaaaaau

SEQ ID NO: 812701 - RNA, 20 nt, Artificial Sequence
  Synthetic
cugcucaauuaaaaaaaaau

SEQ ID NO: 812702 - RNA, 20 nt, Artificial Sequence
  Synthetic
auaaccccaucaaaaaaaau

SEQ ID NO: 812703 - RNA, 20 nt, Artificial Sequence
  Synthetic
aguagaaaguacaaaaaaau

SEQ ID NO: 812704 - RNA, 20 nt, Artificial Sequence
  Synthetic
aauauucuuuagaaaaaaau

SEQ ID NO: 812705 - RNA, 20 nt, Artificial Sequence
  Synthetic
ucgagggccuugaaaaaaau

SEQ ID NO: 812706 - RNA, 20 nt, Artificial Sequence
  Synthetic
cagaguuccuugaaaaaaau

SEQ ID NO: 812707 - RNA, 20 nt, Artificial Sequence
  Synthetic
aguuucaaguugaaaaaaau

SEQ ID NO: 812708 - RNA, 20 nt, Artificial Sequence
  Synthetic
aauaacccuaauaaaaaaau

SEQ ID NO: 812709 - RNA, 20 nt, Artificial Sequence
  Synthetic
uuuuucucagguaaaaaaau

SEQ ID NO: 812710 - RNA, 20 nt, Artificial Sequence
  Synthetic
cacuguaaucuuaaaaaaau

SEQ ID NO: 812711 - RNA, 20 nt, Artificial Sequence
  Synthetic
agguccaaaguccaaaaaau

SEQ ID NO: 812712 - RNA, 20 nt, Artificial Sequence
  Synthetic
uggcuuuuuacagaaaaaau

SEQ ID NO: 812713 - RNA, 20 nt, Artificial Sequence
  Synthetic
acuuaagaaguagaaaaaau

SEQ ID NO: 812714 - RNA, 20 nt, Artificial Sequence
  Synthetic
auauuucugguagaaaaaau

SEQ ID NO: 812715 - RNA, 20 nt, Artificial Sequence
  Synthetic
auacaaaauccugaaaaaau

SEQ ID NO: 812716 - RNA, 20 nt, Artificial Sequence
  Synthetic
uuauguaggaaauaaaaaau

SEQ ID NO: 812717 - RNA, 20 nt, Artificial Sequence
  Synthetic
uaaaacaucauuuaaaaaau

SEQ ID NO: 812718 - RNA, 20 nt, Artificial Sequence
  Synthetic
aacacaaucaacacaaaaau

SEQ ID NO: 812719 - RNA, 20 nt, Artificial Sequence
  Synthetic
auugugucauucacaaaaau

SEQ ID NO: 812720 - RNA, 20 nt, Artificial Sequence
  Synthetic
ucugcuaaaaauacaaaaau

SEQ ID NO: 812721 - RNA, 20 nt, Artificial Sequence
  Synthetic
uuuugccacaauacaaaaau

SEQ ID NO: 812722 - RNA, 20 nt, Artificial Sequence
  Synthetic
aaugaggcauguucaaaaau

SEQ ID NO: 812723 - RNA, 20 nt, Artificial Sequence
  Synthetic
caugauaaaaacagaaaaau

SEQ ID NO: 812724 - RNA, 20 nt, Artificial Sequence
  Synthetic
aggaugauuaccagaaaaau

SEQ ID NO: 812725 - RNA, 20 nt, Artificial Sequence
  Synthetic
ucuguguggaggagaaaaau

SEQ ID NO: 812726 - RNA, 20 nt, Artificial Sequence
  Synthetic
cagacuaacuggagaaaaau

SEQ ID NO: 812727 - RNA, 20 nt, Artificial Sequence
  Synthetic
agauaauccaauagaaaaau

SEQ ID NO: 812728 - RNA, 20 nt, Artificial Sequence
  Synthetic
uagauagaaaguagaaaaau

SEQ ID NO: 812729 - RNA, 20 nt, Artificial Sequence
  Synthetic
acuuaaaacauuagaaaaau

SEQ ID NO: 812730 - RNA, 20 nt, Artificial Sequence
  Synthetic
uaggaaaacacaggaaaaau

SEQ ID NO: 812731 - RNA, 20 nt, Artificial Sequence
  Synthetic
uaaaugucaauaggaaaaau

SEQ ID NO: 812732 - RNA, 20 nt, Artificial Sequence
  Synthetic
caaugauauacuggaaaaau

SEQ ID NO: 812733 - RNA, 20 nt, Artificial Sequence
  Synthetic
aaauugcugaguggaaaaau

SEQ ID NO: 812734 - RNA, 20 nt, Artificial Sequence
  Synthetic
uaggcaagauaaugaaaaau

SEQ ID NO: 812735 - RNA, 20 nt, Artificial Sequence
  Synthetic
accagaaguuaaugaaaaau

SEQ ID NO: 812736 - RNA, 20 nt, Artificial Sequence
  Synthetic
aacaaugguccaugaaaaau

SEQ ID NO: 812737 - RNA, 20 nt, Artificial Sequence
  Synthetic
aguauaaaaguaugaaaaau

SEQ ID NO: 812738 - RNA, 20 nt, Artificial Sequence
  Synthetic
aaguccagagucugaaaaau

SEQ ID NO: 812739 - RNA, 20 nt, Artificial Sequence
  Synthetic
cuugccacagagugaaaaau

SEQ ID NO: 812740 - RNA, 20 nt, Artificial Sequence
  Synthetic
ucuuauuuaaauugaaaaau

SEQ ID NO: 812741 - RNA, 20 nt, Artificial Sequence
  Synthetic
uccucucuguauugaaaaau

SEQ ID NO: 812742 - RNA, 20 nt, Artificial Sequence
  Synthetic
uaguaaaugauuugaaaaau

SEQ ID NO: 812743 - RNA, 20 nt, Artificial Sequence
  Synthetic
uuauacauaaaaauaaaaau

SEQ ID NO: 812744 - RNA, 20 nt, Artificial Sequence
  Synthetic
acacucaugaaaauaaaaau

SEQ ID NO: 812745 - RNA, 20 nt, Artificial Sequence
  Synthetic
uuucauuuuuaaauaaaaau

SEQ ID NO: 812746 - RNA, 20 nt, Artificial Sequence
  Synthetic
uauucaaaagacauaaaaau

SEQ ID NO: 812747 - RNA, 20 nt, Artificial Sequence
  Synthetic
aaccacauggugauaaaaau

SEQ ID NO: 812748 - RNA, 20 nt, Artificial Sequence
  Synthetic
aauucuuaucauauaaaaau

SEQ ID NO: 812749 - RNA, 20 nt, Artificial Sequence
  Synthetic
caaguuguuauuauaaaaau

SEQ ID NO: 812750 - RNA, 20 nt, Artificial Sequence
  Synthetic
cuuuuucuugaacuaaaaau

SEQ ID NO: 812751 - RNA, 20 nt, Artificial Sequence
  Synthetic
acuccucugauucuaaaaau

SEQ ID NO: 812752 - RNA, 20 nt, Artificial Sequence
  Synthetic
uauuuucuggcauuaaaaau

SEQ ID NO: 812753 - RNA, 20 nt, Artificial Sequence
  Synthetic
aaaauccuacuauuaaaaau

SEQ ID NO: 812754 - RNA, 20 nt, Artificial Sequence
  Synthetic
ugaaaagagcucuuaaaaau

SEQ ID NO: 812755 - RNA, 20 nt, Artificial Sequence
  Synthetic
uaacaguccguguuaaaaau

SEQ ID NO: 812756 - RNA, 20 nt, Artificial Sequence
  Synthetic
ccuuuguucacuuuaaaaau

SEQ ID NO: 812757 - RNA, 20 nt, Artificial Sequence
  Synthetic
aaaaauaguucuuuaaaaau

SEQ ID NO: 812758 - RNA, 20 nt, Artificial Sequence
  Synthetic
uccucucuaaugaacaaaau

SEQ ID NO: 812759 - RNA, 20 nt, Artificial Sequence
  Synthetic
aaaaaauugaguaacaaaau

SEQ ID NO: 812760 - RNA, 20 nt, Artificial Sequence
  Synthetic
cuccuugcuacacacaaaau

SEQ ID NO: 812761 - RNA, 20 nt, Artificial Sequence
  Synthetic
cuggguuucaagcacaaaau

SEQ ID NO: 812762 - RNA, 20 nt, Artificial Sequence
  Synthetic
uacaaagggcagcacaaaau

SEQ ID NO: 812763 - RNA, 20 nt, Artificial Sequence
  Synthetic
aacaagauuuggcacaaaau

SEQ ID NO: 812764 - RNA, 20 nt, Artificial Sequence
  Synthetic
auaaggaaaaaucacaaaau

SEQ ID NO: 812765 - RNA, 20 nt, Artificial Sequence
  Synthetic
aaugacaagugucacaaaau

SEQ ID NO: 812766 - RNA, 20 nt, Artificial Sequence
  Synthetic
uuaucauauaaagacaaaau

SEQ ID NO: 812767 - RNA, 20 nt, Artificial Sequence
  Synthetic
auucuuauaucagacaaaau

SEQ ID NO: 812768 - RNA, 20 nt, Artificial Sequence
  Synthetic
auacuucuauuagacaaaau

SEQ ID NO: 812769 - RNA, 20 nt, Artificial Sequence
  Synthetic
acaaaauucauauacaaaau

SEQ ID NO: 812770 - RNA, 20 nt, Artificial Sequence
  Synthetic
aagaaagaauacuacaaaau

SEQ ID NO: 812771 - RNA, 20 nt, Artificial Sequence
  Synthetic
auuuaaugcauaaccaaaau

SEQ ID NO: 812772 - RNA, 20 nt, Artificial Sequence
  Synthetic
agggaaaugaagcccaaaau

SEQ ID NO: 812773 - RNA, 20 nt, Artificial Sequence
  Synthetic
augauauguaaauccaaaau

SEQ ID NO: 812774 - RNA, 20 nt, Artificial Sequence
  Synthetic
auuagaaauacuuccaaaau

SEQ ID NO: 812775 - RNA, 20 nt, Artificial Sequence
  Synthetic
uaagagaagaaaagcaaaau

SEQ ID NO: 812776 - RNA, 20 nt, Artificial Sequence
  Synthetic
caguuagaaaauggcaaaau

SEQ ID NO: 812777 - RNA, 20 nt, Artificial Sequence
  Synthetic
cagagugagcagaucaaaau

SEQ ID NO: 812778 - RNA, 20 nt, Artificial Sequence
  Synthetic
acagauagucagaucaaaau

SEQ ID NO: 812779 - RNA, 20 nt, Artificial Sequence
  Synthetic
cuacuaagcauacucaaaau

SEQ ID NO: 812780 - RNA, 20 nt, Artificial Sequence
  Synthetic
auagaaaaccagcucaaaau

SEQ ID NO: 812781 - RNA, 20 nt, Artificial Sequence
  Synthetic
caauggauagaucucaaaau

SEQ ID NO: 812782 - RNA, 20 nt, Artificial Sequence
  Synthetic
auugcaaugguucucaaaau

SEQ ID NO: 812783 - RNA, 20 nt, Artificial Sequence
  Synthetic
aguagcuuugaagucaaaau

SEQ ID NO: 812784 - RNA, 20 nt, Artificial Sequence
  Synthetic
ugccuauuuucagucaaaau

SEQ ID NO: 812785 - RNA, 20 nt, Artificial Sequence
  Synthetic
uccugucucauagucaaaau

SEQ ID NO: 812786 - RNA, 20 nt, Artificial Sequence
  Synthetic
ucagagaaugcugucaaaau

SEQ ID NO: 812787 - RNA, 20 nt, Artificial Sequence
  Synthetic
agucaucucuuugucaaaau

SEQ ID NO: 812788 - RNA, 20 nt, Artificial Sequence
  Synthetic
caaaccccaaaauucaaaau

SEQ ID NO: 812789 - RNA, 20 nt, Artificial Sequence
  Synthetic
cuuuaagaucacuucaaaau

SEQ ID NO: 812790 - RNA, 20 nt, Artificial Sequence
  Synthetic
acuuuuuucuuuuucaaaau

SEQ ID NO: 812791 - RNA, 20 nt, Artificial Sequence
  Synthetic
ucaggucuuaaaaagaaaau

SEQ ID NO: 812792 - RNA, 20 nt, Artificial Sequence
  Synthetic
ccaacaacccaaaagaaaau

SEQ ID NO: 812793 - RNA, 20 nt, Artificial Sequence
  Synthetic
auagacuggauaaagaaaau

SEQ ID NO: 812794 - RNA, 20 nt, Artificial Sequence
  Synthetic
caaaaagugggcaagaaaau

SEQ ID NO: 812795 - RNA, 20 nt, Artificial Sequence
  Synthetic
uaagauaacuucaagaaaau

SEQ ID NO: 812796 - RNA, 20 nt, Artificial Sequence
  Synthetic
uaucaauaacauaagaaaau

SEQ ID NO: 812797 - RNA, 20 nt, Artificial Sequence
  Synthetic
caaugcaagacacagaaaau

SEQ ID NO: 812798 - RNA, 20 nt, Artificial Sequence
  Synthetic
agggagagaugccagaaaau

SEQ ID NO: 812799 - RNA, 20 nt, Artificial Sequence
  Synthetic
agccagccucuccagaaaau

SEQ ID NO: 812800 - RNA, 20 nt, Artificial Sequence
  Synthetic
aggcaaaauguucagaaaau

SEQ ID NO: 812801 - RNA, 20 nt, Artificial Sequence
  Synthetic
ucuggaucuuaggagaaaau

SEQ ID NO: 812802 - RNA, 20 nt, Artificial Sequence
  Synthetic
uugagagugugggagaaaau

SEQ ID NO: 812803 - RNA, 20 nt, Artificial Sequence
  Synthetic
cauauauugcaugagaaaau

SEQ ID NO: 812804 - RNA, 20 nt, Artificial Sequence
  Synthetic
cacaaaguaauugagaaaau

SEQ ID NO: 812805 - RNA, 20 nt, Artificial Sequence
  Synthetic
aauuuucacaucuagaaaau

SEQ ID NO: 812806 - RNA, 20 nt, Artificial Sequence
  Synthetic
cuucauaaaaauuagaaaau

SEQ ID NO: 812807 - RNA, 20 nt, Artificial Sequence
  Synthetic
acauguaaaauuuagaaaau

SEQ ID NO: 812808 - RNA, 20 nt, Artificial Sequence
  Synthetic
uaugguuucauuuagaaaau

SEQ ID NO: 812809 - RNA, 20 nt, Artificial Sequence
  Synthetic
ccuucauguacaaggaaaau

SEQ ID NO: 812810 - RNA, 20 nt, Artificial Sequence
  Synthetic
uauuaagaagcaaggaaaau

SEQ ID NO: 812811 - RNA, 20 nt, Artificial Sequence
  Synthetic
uugauaguggcaaggaaaau

SEQ ID NO: 812812 - RNA, 20 nt, Artificial Sequence
  Synthetic
ucaggguucagaaggaaaau

SEQ ID NO: 812813 - RNA, 20 nt, Artificial Sequence
  Synthetic
agauaugggauaaggaaaau

SEQ ID NO: 812814 - RNA, 20 nt, Artificial Sequence
  Synthetic
uugcacuaacacaggaaaau

SEQ ID NO: 812815 - RNA, 20 nt, Artificial Sequence
  Synthetic
cagaauaguuucaggaaaau

SEQ ID NO: 812816 - RNA, 20 nt, Artificial Sequence
  Synthetic
uggugaagguguaggaaaau

SEQ ID NO: 812817 - RNA, 20 nt, Artificial Sequence
  Synthetic
uaaacaauccaacggaaaau

SEQ ID NO: 812818 - RNA, 20 nt, Artificial Sequence
  Synthetic
aaaauggaagaagggaaaau

SEQ ID NO: 812819 - RNA, 20 nt, Artificial Sequence
  Synthetic
ugucaagaccuggggaaaau

SEQ ID NO: 812820 - RNA, 20 nt, Artificial Sequence
  Synthetic
auaaacggugcugggaaaau

SEQ ID NO: 812821 - RNA, 20 nt, Artificial Sequence
  Synthetic
uguuuucuccaauggaaaau

SEQ ID NO: 812822 - RNA, 20 nt, Artificial Sequence
  Synthetic
uagccaaaagcauggaaaau

SEQ ID NO: 812823 - RNA, 20 nt, Artificial Sequence
  Synthetic
augcaaguaucauggaaaau

SEQ ID NO: 812824 - RNA, 20 nt, Artificial Sequence
  Synthetic
cacucacaugccuggaaaau

SEQ ID NO: 812825 - RNA, 20 nt, Artificial Sequence
  Synthetic
agcuucuuugccuggaaaau

SEQ ID NO: 812826 - RNA, 20 nt, Artificial Sequence
  Synthetic
auuauuaugugcuggaaaau

SEQ ID NO: 812827 - RNA, 20 nt, Artificial Sequence
  Synthetic
uggauuuagggguggaaaau

SEQ ID NO: 812828 - RNA, 20 nt, Artificial Sequence
  Synthetic
caaaacugaauaaugaaaau

SEQ ID NO: 812829 - RNA, 20 nt, Artificial Sequence
  Synthetic
aaaggaaauaaacugaaaau

SEQ ID NO: 812830 - RNA, 20 nt, Artificial Sequence
  Synthetic
ucccaauuuugacugaaaau

SEQ ID NO: 812831 - RNA, 20 nt, Artificial Sequence
  Synthetic
cauauucauuuacugaaaau

SEQ ID NO: 812832 - RNA, 20 nt, Artificial Sequence
  Synthetic
aaaguuagaaaccugaaaau

SEQ ID NO: 812833 - RNA, 20 nt, Artificial Sequence
  Synthetic
aacucuuuauuucugaaaau

SEQ ID NO: 812834 - RNA, 20 nt, Artificial Sequence
  Synthetic
caagucccuucagugaaaau

SEQ ID NO: 812835 - RNA, 20 nt, Artificial Sequence
  Synthetic
auguuuugaagagugaaaau

SEQ ID NO: 812836 - RNA, 20 nt, Artificial Sequence
  Synthetic
auaauucaaaaugugaaaau

SEQ ID NO: 812837 - RNA, 20 nt, Artificial Sequence
  Synthetic
agguaguuaaccuugaaaau

SEQ ID NO: 812838 - RNA, 20 nt, Artificial Sequence
  Synthetic
uaguaauaaugcuugaaaau

SEQ ID NO: 812839 - RNA, 20 nt, Artificial Sequence
  Synthetic
uacucugucuuguugaaaau

SEQ ID NO: 812840 - RNA, 20 nt, Artificial Sequence
  Synthetic
uuuucaguguuguugaaaau

SEQ ID NO: 812841 - RNA, 20 nt, Artificial Sequence
  Synthetic
caaaguuugcuuuugaaaau

SEQ ID NO: 812842 - RNA, 20 nt, Artificial Sequence
  Synthetic
cauaaacaagcaaauaaaau

SEQ ID NO: 812843 - RNA, 20 nt, Artificial Sequence
  Synthetic
ccuauagcagucaauaaaau

SEQ ID NO: 812844 - RNA, 20 nt, Artificial Sequence
  Synthetic
uuuacuaaaaagaauaaaau

SEQ ID NO: 812845 - RNA, 20 nt, Artificial Sequence
  Synthetic
ucauuugagaagaauaaaau

SEQ ID NO: 812846 - RNA, 20 nt, Artificial Sequence
  Synthetic
acauuaguaaggaauaaaau

SEQ ID NO: 812847 - RNA, 20 nt, Artificial Sequence
  Synthetic
agauacaauaggaauaaaau

SEQ ID NO: 812848 - RNA, 20 nt, Artificial Sequence
  Synthetic
uauuauuuuaggaauaaaau

SEQ ID NO: 812849 - RNA, 20 nt, Artificial Sequence
  Synthetic
caagguucuuggaauaaaau

SEQ ID NO: 812850 - RNA, 20 nt, Artificial Sequence
  Synthetic
uucaacaccuuuaauaaaau

SEQ ID NO: 812851 - RNA, 20 nt, Artificial Sequence
  Synthetic
aucuaauggaaacauaaaau

SEQ ID NO: 812852 - RNA, 20 nt, Artificial Sequence
  Synthetic
uacauauguacacauaaaau

SEQ ID NO: 812853 - RNA, 20 nt, Artificial Sequence
  Synthetic
aucauuuuuucacauaaaau

SEQ ID NO: 812854 - RNA, 20 nt, Artificial Sequence
  Synthetic
aauauaauaugccauaaaau

SEQ ID NO: 812855 - RNA, 20 nt, Artificial Sequence
  Synthetic
ugguuuuaaugucauaaaau

SEQ ID NO: 812856 - RNA, 20 nt, Artificial Sequence
  Synthetic
cuugaggagucagauaaaau

SEQ ID NO: 812857 - RNA, 20 nt, Artificial Sequence
  Synthetic
aauuuuagaagauauaaaau

SEQ ID NO: 812858 - RNA, 20 nt, Artificial Sequence
  Synthetic
uuauagauuagauauaaaau

SEQ ID NO: 812859 - RNA, 20 nt, Artificial Sequence
  Synthetic
ucaacacuuuacuauaaaau

SEQ ID NO: 812860 - RNA, 20 nt, Artificial Sequence
  Synthetic
aguuuaucuagcuauaaaau

SEQ ID NO: 812861 - RNA, 20 nt, Artificial Sequence
  Synthetic
cccuuugaaaucuauaaaau

SEQ ID NO: 812862 - RNA, 20 nt, Artificial Sequence
  Synthetic
uguuuucucgucuauaaaau

SEQ ID NO: 812863 - RNA, 20 nt, Artificial Sequence
  Synthetic
ugucugacaagguauaaaau

SEQ ID NO: 812864 - RNA, 20 nt, Artificial Sequence
  Synthetic
acauuucugauguauaaaau

SEQ ID NO: 812865 - RNA, 20 nt, Artificial Sequence
  Synthetic
acucuucaaaguuauaaaau

SEQ ID NO: 812866 - RNA, 20 nt, Artificial Sequence
  Synthetic
aguaaaccaagaacuaaaau

SEQ ID NO: 812867 - RNA, 20 nt, Artificial Sequence
  Synthetic
auuaaaaaacgaacuaaaau

SEQ ID NO: 812868 - RNA, 20 nt, Artificial Sequence
  Synthetic
aaauguagaccuacuaaaau

SEQ ID NO: 812869 - RNA, 20 nt, Artificial Sequence
  Synthetic
aaugacagcacaccuaaaau

SEQ ID NO: 812870 - RNA, 20 nt, Artificial Sequence
  Synthetic
auucacacauagccuaaaau

SEQ ID NO: 812871 - RNA, 20 nt, Artificial Sequence
  Synthetic
acaaauaaaauagcuaaaau

SEQ ID NO: 812872 - RNA, 20 nt, Artificial Sequence
  Synthetic
aauugaaagauggcuaaaau

SEQ ID NO: 812873 - RNA, 20 nt, Artificial Sequence
  Synthetic
cgguuuucugucucuaaaau

SEQ ID NO: 812874 - RNA, 20 nt, Artificial Sequence
  Synthetic
caaaaagcugggucuaaaau

SEQ ID NO: 812875 - RNA, 20 nt, Artificial Sequence
  Synthetic
uacccaauauggucuaaaau

SEQ ID NO: 812876 - RNA, 20 nt, Artificial Sequence
  Synthetic
cccuuugaguauucuaaaau

SEQ ID NO: 812877 - RNA, 20 nt, Artificial Sequence
  Synthetic
aagauuuauauuucuaaaau

SEQ ID NO: 812878 - RNA, 20 nt, Artificial Sequence
  Synthetic
auuuuauucuuuucuaaaau

SEQ ID NO: 812879 - RNA, 20 nt, Artificial Sequence
  Synthetic
ccaacuuauaaaaguaaaau

SEQ ID NO: 812880 - RNA, 20 nt, Artificial Sequence
  Synthetic
caauaaucugaaaguaaaau

SEQ ID NO: 812881 - RNA, 20 nt, Artificial Sequence
  Synthetic
aauuuucucauaaguaaaau

SEQ ID NO: 812882 - RNA, 20 nt, Artificial Sequence
  Synthetic
auuuuaaaagacaguaaaau

SEQ ID NO: 812883 - RNA, 20 nt, Artificial Sequence
  Synthetic
uuuaagauuagcaguaaaau

SEQ ID NO: 812884 - RNA, 20 nt, Artificial Sequence
  Synthetic
uccccaagaaucaguaaaau

SEQ ID NO: 812885 - RNA, 20 nt, Artificial Sequence
  Synthetic
uucuuauaaaagaguaaaau

SEQ ID NO: 812886 - RNA, 20 nt, Artificial Sequence
  Synthetic
auuguauagaagaguaaaau

SEQ ID NO: 812887 - RNA, 20 nt, Artificial Sequence
  Synthetic
aguucuaaagagaguaaaau

SEQ ID NO: 812888 - RNA, 20 nt, Artificial Sequence
  Synthetic
aagaccagccugaguaaaau

SEQ ID NO: 812889 - RNA, 20 nt, Artificial Sequence
  Synthetic
auuuucuuuacuaguaaaau

SEQ ID NO: 812890 - RNA, 20 nt, Artificial Sequence
  Synthetic
cugaguaauuaucguaaaau

SEQ ID NO: 812891 - RNA, 20 nt, Artificial Sequence
  Synthetic
uauuucgucaacuguaaaau

SEQ ID NO: 812892 - RNA, 20 nt, Artificial Sequence
  Synthetic
aauuaccucaccuguaaaau

SEQ ID NO: 812893 - RNA, 20 nt, Artificial Sequence
  Synthetic
ugugcccucgccuguaaaau

SEQ ID NO: 812894 - RNA, 20 nt, Artificial Sequence
  Synthetic
uaauuucucagcuguaaaau

SEQ ID NO: 812895 - RNA, 20 nt, Artificial Sequence
  Synthetic
aguuuccuucucuguaaaau

SEQ ID NO: 812896 - RNA, 20 nt, Artificial Sequence
  Synthetic
caaauaaguuucuguaaaau

SEQ ID NO: 812897 - RNA, 20 nt, Artificial Sequence
  Synthetic
uaaacuuuacuguguaaaau

SEQ ID NO: 812898 - RNA, 20 nt, Artificial Sequence
  Synthetic
uuggaaaaauauuguaaaau

SEQ ID NO: 812899 - RNA, 20 nt, Artificial Sequence
  Synthetic
uuucuaugacaaauuaaaau

SEQ ID NO: 812900 - RNA, 20 nt, Artificial Sequence
  Synthetic
uaugaucaggaaauuaaaau

SEQ ID NO: 812901 - RNA, 20 nt, Artificial Sequence
  Synthetic
aagaaccacagaauuaaaau

SEQ ID NO: 812902 - RNA, 20 nt, Artificial Sequence
  Synthetic
uagugauugcuaauuaaaau

SEQ ID NO: 812903 - RNA, 20 nt, Artificial Sequence
  Synthetic
cauaucugagccauuaaaau

SEQ ID NO: 812904 - RNA, 20 nt, Artificial Sequence
  Synthetic
acaaauaaucugauuaaaau

SEQ ID NO: 812905 - RNA, 20 nt, Artificial Sequence
  Synthetic
uaauauccuaauauuaaaau

SEQ ID NO: 812906 - RNA, 20 nt, Artificial Sequence
  Synthetic
cuucucagcuauauuaaaau

SEQ ID NO: 812907 - RNA, 20 nt, Artificial Sequence
  Synthetic
uucuaauauguuauuaaaau

SEQ ID NO: 812908 - RNA, 20 nt, Artificial Sequence
  Synthetic
acaaauccaggucuuaaaau

SEQ ID NO: 812909 - RNA, 20 nt, Artificial Sequence
  Synthetic
caguguuucauucuuaaaau

SEQ ID NO: 812910 - RNA, 20 nt, Artificial Sequence
  Synthetic
aaaucaagaacaguuaaaau

SEQ ID NO: 812911 - RNA, 20 nt, Artificial Sequence
  Synthetic
agugaauggcagguuaaaau

SEQ ID NO: 812912 - RNA, 20 nt, Artificial Sequence
  Synthetic
uuucuuaauauuguuaaaau

SEQ ID NO: 812913 - RNA, 20 nt, Artificial Sequence
  Synthetic
cccuaggagguuguuaaaau

SEQ ID NO: 812914 - RNA, 20 nt, Artificial Sequence
  Synthetic
uuuuuuuauuaauuuaaaau

SEQ ID NO: 812915 - RNA, 20 nt, Artificial Sequence
  Synthetic
augaguaagacauuuaaaau

SEQ ID NO: 812916 - RNA, 20 nt, Artificial Sequence
  Synthetic
uuauuauguagauuuaaaau

SEQ ID NO: 812917 - RNA, 20 nt, Artificial Sequence
  Synthetic
uguggacugugauuuaaaau

SEQ ID NO: 812918 - RNA, 20 nt, Artificial Sequence
  Synthetic
caugauacccuauuuaaaau

SEQ ID NO: 812919 - RNA, 20 nt, Artificial Sequence
  Synthetic
acauaaagagacuuuaaaau

SEQ ID NO: 812920 - RNA, 20 nt, Artificial Sequence
  Synthetic
auaaaauuguuguuuaaaau

SEQ ID NO: 812921 - RNA, 20 nt, Artificial Sequence
  Synthetic
aauuaaccugauuuuaaaau

SEQ ID NO: 812922 - RNA, 20 nt, Artificial Sequence
  Synthetic
aguccuuaauauuuuaaaau

SEQ ID NO: 812923 - RNA, 20 nt, Artificial Sequence
  Synthetic
aguuuuugcgcuuuuaaaau

SEQ ID NO: 812924 - RNA, 20 nt, Artificial Sequence
  Synthetic
aucuuccucauuuuuaaaau

SEQ ID NO: 812925 - RNA, 20 nt, Artificial Sequence
  Synthetic
ugggauccugaaaaacaaau

SEQ ID NO: 812926 - RNA, 20 nt, Artificial Sequence
  Synthetic
cucuugaucaccaaacaaau

SEQ ID NO: 812927 - RNA, 20 nt, Artificial Sequence
  Synthetic
uccagaggagccaaacaaau

SEQ ID NO: 812928 - RNA, 20 nt, Artificial Sequence
  Synthetic
cagaaugccuuuaaacaaau

SEQ ID NO: 812929 - RNA, 20 nt, Artificial Sequence
  Synthetic
uugucuuucucagaacaaau

SEQ ID NO: 812930 - RNA, 20 nt, Artificial Sequence
  Synthetic
uuaaaauuaugagaacaaau

SEQ ID NO: 812931 - RNA, 20 nt, Artificial Sequence
  Synthetic
ucuaauauuauauaacaaau

SEQ ID NO: 812932 - RNA, 20 nt, Artificial Sequence
  Synthetic
caauacuaucucuaacaaau

SEQ ID NO: 812933 - RNA, 20 nt, Artificial Sequence
  Synthetic
ccuguagcauucacacaaau

SEQ ID NO: 812934 - RNA, 20 nt, Artificial Sequence
  Synthetic
aaaaaucacaaaccacaaau

SEQ ID NO: 812935 - RNA, 20 nt, Artificial Sequence
  Synthetic
acauuuuuaagugcacaaau

SEQ ID NO: 812936 - RNA, 20 nt, Artificial Sequence
  Synthetic
agagguuaguaaagacaaau

SEQ ID NO: 812937 - RNA, 20 nt, Artificial Sequence
  Synthetic
agauugggguugagacaaau

SEQ ID NO: 812938 - RNA, 20 nt, Artificial Sequence
  Synthetic
accagugccagacgacaaau

SEQ ID NO: 812939 - RNA, 20 nt, Artificial Sequence
  Synthetic
aaaagccaaaacggacaaau

SEQ ID NO: 812940 - RNA, 20 nt, Artificial Sequence
  Synthetic
aaaagccaaaauugacaaau

SEQ ID NO: 812941 - RNA, 20 nt, Artificial Sequence
  Synthetic
agaagccaaaauugacaaau

SEQ ID NO: 812942 - RNA, 20 nt, Artificial Sequence
  Synthetic
aaaagccagaauugacaaau

SEQ ID NO: 812943 - RNA, 20 nt, Artificial Sequence
  Synthetic
ucuaaaguauaauuacaaau

SEQ ID NO: 812944 - RNA, 20 nt, Artificial Sequence
  Synthetic
uaaauauacccauuacaaau

SEQ ID NO: 812945 - RNA, 20 nt, Artificial Sequence
  Synthetic
uaaacagacaaacaccaaau

SEQ ID NO: 812946 - RNA, 20 nt, Artificial Sequence
  Synthetic
ucucuuuacacagaccaaau

SEQ ID NO: 812947 - RNA, 20 nt, Artificial Sequence
  Synthetic
aaaaugguaauuuaccaaau

SEQ ID NO: 812948 - RNA, 20 nt, Artificial Sequence
  Synthetic
uauuuugauuuaacccaaau

SEQ ID NO: 812949 - RNA, 20 nt, Artificial Sequence
  Synthetic
aaauucaguaugacccaaau

SEQ ID NO: 812950 - RNA, 20 nt, Artificial Sequence
  Synthetic
auccauuaauuuacccaaau

SEQ ID NO: 812951 - RNA, 20 nt, Artificial Sequence
  Synthetic
acaggucuccuuccccaaau

SEQ ID NO: 812952 - RNA, 20 nt, Artificial Sequence
  Synthetic
uggaauguuuuugcccaaau

SEQ ID NO: 812953 - RNA, 20 nt, Artificial Sequence
  Synthetic
uaucaauuuauuucccaaau

SEQ ID NO: 812954 - RNA, 20 nt, Artificial Sequence
  Synthetic
uugggugacagaagccaaau

SEQ ID NO: 812955 - RNA, 20 nt, Artificial Sequence
  Synthetic
agagugaggaguggccaaau

SEQ ID NO: 812956 - RNA, 20 nt, Artificial Sequence
  Synthetic
auaauauugaucauccaaau

SEQ ID NO: 812957 - RNA, 20 nt, Artificial Sequence
  Synthetic
uaaugacccuaucuccaaau

SEQ ID NO: 812958 - RNA, 20 nt, Artificial Sequence
  Synthetic
uuacuuacugaauuccaaau

SEQ ID NO: 812959 - RNA, 20 nt, Artificial Sequence
  Synthetic
agcauaugucuauuccaaau

SEQ ID NO: 812960 - RNA, 20 nt, Artificial Sequence
  Synthetic
ugcaauagucaaaagcaaau

SEQ ID NO: 812961 - RNA, 20 nt, Artificial Sequence
  Synthetic
uaucaaauauuaaagcaaau

SEQ ID NO: 812962 - RNA, 20 nt, Artificial Sequence
  Synthetic
aaagagauggaccagcaaau

SEQ ID NO: 812963 - RNA, 20 nt, Artificial Sequence
  Synthetic
auuauguggaugcagcaaau

SEQ ID NO: 812964 - RNA, 20 nt, Artificial Sequence
  Synthetic
aggauauacagauagcaaau

SEQ ID NO: 812965 - RNA, 20 nt, Artificial Sequence
  Synthetic
uuuccauaagguuagcaaau

SEQ ID NO: 812966 - RNA, 20 nt, Artificial Sequence
  Synthetic
cuaaaaggaauaccgcaaau

SEQ ID NO: 812967 - RNA, 20 nt, Artificial Sequence
  Synthetic
uaucauuggagaaggcaaau

SEQ ID NO: 812968 - RNA, 20 nt, Artificial Sequence
  Synthetic
ucuaccaaauugaggcaaau

SEQ ID NO: 812969 - RNA, 20 nt, Artificial Sequence
  Synthetic
aucgcaggaguugggcaaau

SEQ ID NO: 812970 - RNA, 20 nt, Artificial Sequence
  Synthetic
aaagacacagacuggcaaau

SEQ ID NO: 812971 - RNA, 20 nt, Artificial Sequence
  Synthetic
aaacugauuaguuggcaaau

SEQ ID NO: 812972 - RNA, 20 nt, Artificial Sequence
  Synthetic
aaaagauacuccaugcaaau

SEQ ID NO: 812973 - RNA, 20 nt, Artificial Sequence
  Synthetic
cauacugucaccuugcaaau

SEQ ID NO: 812974 - RNA, 20 nt, Artificial Sequence
  Synthetic
cucuuaaauuguuugcaaau

SEQ ID NO: 812975 - RNA, 20 nt, Artificial Sequence
  Synthetic
auuggagguaaaaaucaaau

SEQ ID NO: 812976 - RNA, 20 nt, Artificial Sequence
  Synthetic
auaaacucaagcaaucaaau

SEQ ID NO: 812977 - RNA, 20 nt, Artificial Sequence
  Synthetic
uauuauugaaacuaucaaau

SEQ ID NO: 812978 - RNA, 20 nt, Artificial Sequence
  Synthetic
uagcagccuuaguaucaaau

SEQ ID NO: 812979 - RNA, 20 nt, Artificial Sequence
  Synthetic
auguuauaugccacucaaau

SEQ ID NO: 812980 - RNA, 20 nt, Artificial Sequence
  Synthetic
cguaaaauaaagccucaaau

SEQ ID NO: 812981 - RNA, 20 nt, Artificial Sequence
  Synthetic
ccaguaucugauucucaaau

SEQ ID NO: 812982 - RNA, 20 nt, Artificial Sequence
  Synthetic
aaaaugcacaaaagucaaau

SEQ ID NO: 812983 - RNA, 20 nt, Artificial Sequence
  Synthetic
uccuucaagucuggucaaau

SEQ ID NO: 812984 - RNA, 20 nt, Artificial Sequence
  Synthetic
uacucuucugacugucaaau

SEQ ID NO: 812985 - RNA, 20 nt, Artificial Sequence
  Synthetic
cagaguaguaucugucaaau

SEQ ID NO: 812986 - RNA, 20 nt, Artificial Sequence
  Synthetic
aaccuccagaagugucaaau

SEQ ID NO: 812987 - RNA, 20 nt, Artificial Sequence
  Synthetic
uucaaugauugaauucaaau

SEQ ID NO: 812988 - RNA, 20 nt, Artificial Sequence
  Synthetic
cuggaacagaucauucaaau

SEQ ID NO: 812989 - RNA, 20 nt, Artificial Sequence
  Synthetic
acuaugaagaagauucaaau

SEQ ID NO: 812990 - RNA, 20 nt, Artificial Sequence
  Synthetic
agauucaauaugauucaaau

SEQ ID NO: 812991 - RNA, 20 nt, Artificial Sequence
  Synthetic
agaaagaaagauauucaaau

SEQ ID NO: 812992 - RNA, 20 nt, Artificial Sequence
  Synthetic
augaaaaaucuuauucaaau

SEQ ID NO: 812993 - RNA, 20 nt, Artificial Sequence
  Synthetic
ucagagggugaauuucaaau

SEQ ID NO: 812994 - RNA, 20 nt, Artificial Sequence
  Synthetic
auaagcucauuauuucaaau

SEQ ID NO: 812995 - RNA, 20 nt, Artificial Sequence
  Synthetic
cuggcuguguauuuucaaau

SEQ ID NO: 812996 - RNA, 20 nt, Artificial Sequence
  Synthetic
acuugaaaagaaaaagaaau

SEQ ID NO: 812997 - RNA, 20 nt, Artificial Sequence
  Synthetic
acaggaagagaaaaagaaau

SEQ ID NO: 812998 - RNA, 20 nt, Artificial Sequence
  Synthetic
aauuauacuaacaaagaaau

SEQ ID NO: 812999 - RNA, 20 nt, Artificial Sequence
  Synthetic
aucaagaaagauaaagaaau

SEQ ID NO: 813000 - RNA, 20 nt, Artificial Sequence
  Synthetic
ccugacaaaaaacaagaaau

SEQ ID NO: 813001 - RNA, 20 nt, Artificial Sequence
  Synthetic
accugacaaaaacaagaaau

SEQ ID NO: 813002 - RNA, 20 nt, Artificial Sequence
  Synthetic
cagaauguaagacaagaaau

SEQ ID NO: 813003 - RNA, 20 nt, Artificial Sequence
  Synthetic
acaauuauauaccaagaaau

SEQ ID NO: 813004 - RNA, 20 nt, Artificial Sequence
  Synthetic
uuuuaugucguucaagaaau

SEQ ID NO: 813005 - RNA, 20 nt, Artificial Sequence
  Synthetic
aaaaguucuuuucaagaaau

SEQ ID NO: 813006 - RNA, 20 nt, Artificial Sequence
  Synthetic
uguucuacaaaagaagaaau

SEQ ID NO: 813007 - RNA, 20 nt, Artificial Sequence
  Synthetic
aagaauccauaggaagaaau

SEQ ID NO: 813008 - RNA, 20 nt, Artificial Sequence
  Synthetic
ucaaggagaguggaagaaau

SEQ ID NO: 813009 - RNA, 20 nt, Artificial Sequence
  Synthetic
agcacuuacaccacagaaau

SEQ ID NO: 813010 - RNA, 20 nt, Artificial Sequence
  Synthetic
aauauuuacaccacagaaau

SEQ ID NO: 813011 - RNA, 20 nt, Artificial Sequence
  Synthetic
uugcugauuuugacagaaau

SEQ ID NO: 813012 - RNA, 20 nt, Artificial Sequence
  Synthetic
aggaacuuuuacccagaaau

SEQ ID NO: 813013 - RNA, 20 nt, Artificial Sequence
  Synthetic
uauaggggaaagccagaaau

SEQ ID NO: 813014 - RNA, 20 nt, Artificial Sequence
  Synthetic
acaaaugguccugcagaaau

SEQ ID NO: 813015 - RNA, 20 nt, Artificial Sequence
  Synthetic
caacuguaucacucagaaau

SEQ ID NO: 813016 - RNA, 20 nt, Artificial Sequence
  Synthetic
aaagcagcuggaagagaaau

SEQ ID NO: 813017 - RNA, 20 nt, Artificial Sequence
  Synthetic
uaccaggcagacagagaaau

SEQ ID NO: 813018 - RNA, 20 nt, Artificial Sequence
  Synthetic
acauaggcauggagagaaau

SEQ ID NO: 813019 - RNA, 20 nt, Artificial Sequence
  Synthetic
caaugagaguugagagaaau

SEQ ID NO: 813020 - RNA, 20 nt, Artificial Sequence
  Synthetic
uggcauaaggcuagagaaau

SEQ ID NO: 813021 - RNA, 20 nt, Artificial Sequence
  Synthetic
uccaaauccaagggagaaau

SEQ ID NO: 813022 - RNA, 20 nt, Artificial Sequence
  Synthetic
uggagaggauggggagaaau

SEQ ID NO: 813023 - RNA, 20 nt, Artificial Sequence
  Synthetic
cuguuccgaaugggagaaau

SEQ ID NO: 813024 - RNA, 20 nt, Artificial Sequence
  Synthetic
ccauuccagaugggagaaau

SEQ ID NO: 813025 - RNA, 20 nt, Artificial Sequence
  Synthetic
aagaugggauugggagaaau

SEQ ID NO: 813026 - RNA, 20 nt, Artificial Sequence
  Synthetic
ucuguggcaucuggagaaau

SEQ ID NO: 813027 - RNA, 20 nt, Artificial Sequence
  Synthetic
uggagaagauguggagaaau

SEQ ID NO: 813028 - RNA, 20 nt, Artificial Sequence
  Synthetic
uggggaagauguggagaaau

SEQ ID NO: 813029 - RNA, 20 nt, Artificial Sequence
  Synthetic
uggagaggauguggagaaau

SEQ ID NO: 813030 - RNA, 20 nt, Artificial Sequence
  Synthetic
caggagcugagccuagaaau

SEQ ID NO: 813031 - RNA, 20 nt, Artificial Sequence
  Synthetic
aguacuccuuuccuagaaau

SEQ ID NO: 813032 - RNA, 20 nt, Artificial Sequence
  Synthetic
aauuuuaagauauuagaaau

SEQ ID NO: 813033 - RNA, 20 nt, Artificial Sequence
  Synthetic
aaauaaauccuuuuagaaau

SEQ ID NO: 813034 - RNA, 20 nt, Artificial Sequence
  Synthetic
aauauaauuucaaaggaaau

SEQ ID NO: 813035 - RNA, 20 nt, Artificial Sequence
  Synthetic
caucaauaaauaaaggaaau

SEQ ID NO: 813036 - RNA, 20 nt, Artificial Sequence
  Synthetic
aaccgcaacuacaaggaaau

SEQ ID NO: 813037 - RNA, 20 nt, Artificial Sequence
  Synthetic
aggaaaauaaggaaggaaau

SEQ ID NO: 813038 - RNA, 20 nt, Artificial Sequence
  Synthetic
ucagggagauagcaggaaau

SEQ ID NO: 813039 - RNA, 20 nt, Artificial Sequence
  Synthetic
caacuguaauaugaggaaau

SEQ ID NO: 813040 - RNA, 20 nt, Artificial Sequence
  Synthetic
uguugaggaugugaggaaau

SEQ ID NO: 813041 - RNA, 20 nt, Artificial Sequence
  Synthetic
caggguaguugugaggaaau

SEQ ID NO: 813042 - RNA, 20 nt, Artificial Sequence
  Synthetic
uacuuggugauauaggaaau

SEQ ID NO: 813043 - RNA, 20 nt, Artificial Sequence
  Synthetic
uacugaguggaguaggaaau

SEQ ID NO: 813044 - RNA, 20 nt, Artificial Sequence
  Synthetic
aaacaaugcaauuaggaaau

SEQ ID NO: 813045 - RNA, 20 nt, Artificial Sequence
  Synthetic
uauucagggauuagggaaau

SEQ ID NO: 813046 - RNA, 20 nt, Artificial Sequence
  Synthetic
aucccuuuuuagggggaaau

SEQ ID NO: 813047 - RNA, 20 nt, Artificial Sequence
  Synthetic
uauuacaggaauggggaaau

SEQ ID NO: 813048 - RNA, 20 nt, Artificial Sequence
  Synthetic
uacaugaaaaccugggaaau

SEQ ID NO: 813049 - RNA, 20 nt, Artificial Sequence
  Synthetic
ugaacaugugggugggaaau

SEQ ID NO: 813050 - RNA, 20 nt, Artificial Sequence
  Synthetic
uccacaauggaaauggaaau

SEQ ID NO: 813051 - RNA, 20 nt, Artificial Sequence
  Synthetic
acacucuguugccuggaaau

SEQ ID NO: 813052 - RNA, 20 nt, Artificial Sequence
  Synthetic
aaaucaccuauaguggaaau

SEQ ID NO: 813053 - RNA, 20 nt, Artificial Sequence
  Synthetic
ucagugggaguauuggaaau

SEQ ID NO: 813054 - RNA, 20 nt, Artificial Sequence
  Synthetic
augucaccagauuuggaaau

SEQ ID NO: 813055 - RNA, 20 nt, Artificial Sequence
  Synthetic
ccuacuuucucuuuggaaau

SEQ ID NO: 813056 - RNA, 20 nt, Artificial Sequence
  Synthetic
uauuuguuuguuuuggaaau

SEQ ID NO: 813057 - RNA, 20 nt, Artificial Sequence
  Synthetic
aaauuccuacaaaaugaaau

SEQ ID NO: 813058 - RNA, 20 nt, Artificial Sequence
  Synthetic
cuuaggccauaaaaugaaau

SEQ ID NO: 813059 - RNA, 20 nt, Artificial Sequence
  Synthetic
uacugauauggaaaugaaau

SEQ ID NO: 813060 - RNA, 20 nt, Artificial Sequence
  Synthetic
uauaaagaggcacaugaaau

SEQ ID NO: 813061 - RNA, 20 nt, Artificial Sequence
  Synthetic
caaggagggaaagaugaaau

SEQ ID NO: 813062 - RNA, 20 nt, Artificial Sequence
  Synthetic
ccauauggaauagaugaaau

SEQ ID NO: 813063 - RNA, 20 nt, Artificial Sequence
  Synthetic
uuucaucucuuagaugaaau

SEQ ID NO: 813064 - RNA, 20 nt, Artificial Sequence
  Synthetic
uguagagacauggaugaaau

SEQ ID NO: 813065 - RNA, 20 nt, Artificial Sequence
  Synthetic
uguagggacauggaugaaau

SEQ ID NO: 813066 - RNA, 20 nt, Artificial Sequence
  Synthetic
uuaaaauuauuugaugaaau

SEQ ID NO: 813067 - RNA, 20 nt, Artificial Sequence
  Synthetic
uauuguucuuacuaugaaau

SEQ ID NO: 813068 - RNA, 20 nt, Artificial Sequence
  Synthetic
aaauagcaacccuaugaaau

SEQ ID NO: 813069 - RNA, 20 nt, Artificial Sequence
  Synthetic
uuacaccaacucuaugaaau

SEQ ID NO: 813070 - RNA, 20 nt, Artificial Sequence
  Synthetic
uuacagcagccuuaugaaau

SEQ ID NO: 813071 - RNA, 20 nt, Artificial Sequence
  Synthetic
auaaacugaucuuaugaaau

SEQ ID NO: 813072 - RNA, 20 nt, Artificial Sequence
  Synthetic
acuguucaaaguuaugaaau

SEQ ID NO: 813073 - RNA, 20 nt, Artificial Sequence
  Synthetic
uaagaaagcaaaacugaaau

SEQ ID NO: 813074 - RNA, 20 nt, Artificial Sequence
  Synthetic
agaaaacaacuaacugaaau

SEQ ID NO: 813075 - RNA, 20 nt, Artificial Sequence
  Synthetic
acaaaugcaucgacugaaau

SEQ ID NO: 813076 - RNA, 20 nt, Artificial Sequence
  Synthetic
uagauaaaaacaccugaaau

SEQ ID NO: 813077 - RNA, 20 nt, Artificial Sequence
  Synthetic
cuguaagucaucccugaaau

SEQ ID NO: 813078 - RNA, 20 nt, Artificial Sequence
  Synthetic
ugggcaugguagccugaaau

SEQ ID NO: 813079 - RNA, 20 nt, Artificial Sequence
  Synthetic
auuaugauacuugcugaaau

SEQ ID NO: 813080 - RNA, 20 nt, Artificial Sequence
  Synthetic
ugagagagaugaucugaaau

SEQ ID NO: 813081 - RNA, 20 nt, Artificial Sequence
  Synthetic
caauugagauccucugaaau

SEQ ID NO: 813082 - RNA, 20 nt, Artificial Sequence
  Synthetic
cagguuagcugcucugaaau

SEQ ID NO: 813083 - RNA, 20 nt, Artificial Sequence
  Synthetic
acagugaaucauucugaaau

SEQ ID NO: 813084 - RNA, 20 nt, Artificial Sequence
  Synthetic
agggugagaagaagugaaau

SEQ ID NO: 813085 - RNA, 20 nt, Artificial Sequence
  Synthetic
uguauauauagaagugaaau

SEQ ID NO: 813086 - RNA, 20 nt, Artificial Sequence
  Synthetic
cacuauuuauuaagugaaau

SEQ ID NO: 813087 - RNA, 20 nt, Artificial Sequence
  Synthetic
uuaaaaaagaguagugaaau

SEQ ID NO: 813088 - RNA, 20 nt, Artificial Sequence
  Synthetic
uguaggcacaugggugaaau

SEQ ID NO: 813089 - RNA, 20 nt, Artificial Sequence
  Synthetic
aguuuuauccaaugugaaau

SEQ ID NO: 813090 - RNA, 20 nt, Artificial Sequence
  Synthetic
ucuuuccuucucugugaaau

SEQ ID NO: 813091 - RNA, 20 nt, Artificial Sequence
  Synthetic
agaguucucauuugugaaau

SEQ ID NO: 813092 - RNA, 20 nt, Artificial Sequence
  Synthetic
aauuaaguaaauauugaaau

SEQ ID NO: 813093 - RNA, 20 nt, Artificial Sequence
  Synthetic
aaauauuuugauauugaaau

SEQ ID NO: 813094 - RNA, 20 nt, Artificial Sequence
  Synthetic
ugacuuauuguuauugaaau

SEQ ID NO: 813095 - RNA, 20 nt, Artificial Sequence
  Synthetic
ucacacugguagcuugaaau

SEQ ID NO: 813096 - RNA, 20 nt, Artificial Sequence
  Synthetic
cuucuguucuugcuugaaau

SEQ ID NO: 813097 - RNA, 20 nt, Artificial Sequence
  Synthetic
uacacccacacucuugaaau

SEQ ID NO: 813098 - RNA, 20 nt, Artificial Sequence
  Synthetic
cccaagucuccuguugaaau

SEQ ID NO: 813099 - RNA, 20 nt, Artificial Sequence
  Synthetic
ucaggucuuuuauuugaaau

SEQ ID NO: 813100 - RNA, 20 nt, Artificial Sequence
  Synthetic
uuuuaaauuuuguuugaaau

SEQ ID NO: 813101 - RNA, 20 nt, Artificial Sequence
  Synthetic
uucauguaggcuuuugaaau

SEQ ID NO: 813102 - RNA, 20 nt, Artificial Sequence
  Synthetic
agcuaucauucuuuugaaau

SEQ ID NO: 813103 - RNA, 20 nt, Artificial Sequence
  Synthetic
acugccauuucuuuugaaau

SEQ ID NO: 813104 - RNA, 20 nt, Artificial Sequence
  Synthetic
uuuguaguaguuuuugaaau

SEQ ID NO: 813105 - RNA, 20 nt, Artificial Sequence
  Synthetic
uaucauuaaugaaaauaaau

SEQ ID NO: 813106 - RNA, 20 nt, Artificial Sequence
  Synthetic
uuuuagauaaggaaauaaau

SEQ ID NO: 813107 - RNA, 20 nt, Artificial Sequence
  Synthetic
aauauaaauuggaaauaaau

SEQ ID NO: 813108 - RNA, 20 nt, Artificial Sequence
  Synthetic
agaauaauacugaaauaaau

SEQ ID NO: 813109 - RNA, 20 nt, Artificial Sequence
  Synthetic
cuaccccuauauaaauaaau

SEQ ID NO: 813110 - RNA, 20 nt, Artificial Sequence
  Synthetic
aauuaaaaaucuaaauaaau

SEQ ID NO: 813111 - RNA, 20 nt, Artificial Sequence
  Synthetic
aagagguaauguaaauaaau

SEQ ID NO: 813112 - RNA, 20 nt, Artificial Sequence
  Synthetic
uauuuugguuuuaaauaaau

SEQ ID NO: 813113 - RNA, 20 nt, Artificial Sequence
  Synthetic
aaauuugauguacaauaaau

SEQ ID NO: 813114 - RNA, 20 nt, Artificial Sequence
  Synthetic
agacuauaugcccaauaaau

SEQ ID NO: 813115 - RNA, 20 nt, Artificial Sequence
  Synthetic
agcuaaucucuucaauaaau

SEQ ID NO: 813116 - RNA, 20 nt, Artificial Sequence
  Synthetic
cauaaauaaggagaauaaau

SEQ ID NO: 813117 - RNA, 20 nt, Artificial Sequence
  Synthetic
ugcacacucaaggaauaaau

SEQ ID NO: 813118 - RNA, 20 nt, Artificial Sequence
  Synthetic
uuuacuuuccaugaauaaau

SEQ ID NO: 813119 - RNA, 20 nt, Artificial Sequence
  Synthetic
aauuaguaccuugaauaaau

SEQ ID NO: 813120 - RNA, 20 nt, Artificial Sequence
  Synthetic
aauauuuuaaaguaauaaau

SEQ ID NO: 813121 - RNA, 20 nt, Artificial Sequence
  Synthetic
agagacuuauuguaauaaau

SEQ ID NO: 813122 - RNA, 20 nt, Artificial Sequence
  Synthetic
acugaaaauaauuaauaaau

SEQ ID NO: 813123 - RNA, 20 nt, Artificial Sequence
  Synthetic
agguucucuuauuaauaaau

SEQ ID NO: 813124 - RNA, 20 nt, Artificial Sequence
  Synthetic
aacuaagaguauacauaaau

SEQ ID NO: 813125 - RNA, 20 nt, Artificial Sequence
  Synthetic
ugcuuauuguauacauaaau

SEQ ID NO: 813126 - RNA, 20 nt, Artificial Sequence
  Synthetic
auaauagaaaugccauaaau

SEQ ID NO: 813127 - RNA, 20 nt, Artificial Sequence
  Synthetic
uugucuucucaagcauaaau

SEQ ID NO: 813128 - RNA, 20 nt, Artificial Sequence
  Synthetic
uugcaaccuuaggcauaaau

SEQ ID NO: 813129 - RNA, 20 nt, Artificial Sequence
  Synthetic
ugguaccugugggcauaaau

SEQ ID NO: 813130 - RNA, 20 nt, Artificial Sequence
  Synthetic
aggcaacauguugcauaaau

SEQ ID NO: 813131 - RNA, 20 nt, Artificial Sequence
  Synthetic
ugaccucauaacucauaaau

SEQ ID NO: 813132 - RNA, 20 nt, Artificial Sequence
  Synthetic
agauuucuguguucauaaau

SEQ ID NO: 813133 - RNA, 20 nt, Artificial Sequence
  Synthetic
ucuucuaauauuucauaaau

SEQ ID NO: 813134 - RNA, 20 nt, Artificial Sequence
  Synthetic
uggcuagaugcaagauaaau

SEQ ID NO: 813135 - RNA, 20 nt, Artificial Sequence
  Synthetic
uacaauaaaauaagauaaau

SEQ ID NO: 813136 - RNA, 20 nt, Artificial Sequence
  Synthetic
uaauaaccuguaagauaaau

SEQ ID NO: 813137 - RNA, 20 nt, Artificial Sequence
  Synthetic
cuuaaaauggcaggauaaau

SEQ ID NO: 813138 - RNA, 20 nt, Artificial Sequence
  Synthetic
agauuugaaguaggauaaau

SEQ ID NO: 813139 - RNA, 20 nt, Artificial Sequence
  Synthetic
cugcacgcugagggauaaau

SEQ ID NO: 813140 - RNA, 20 nt, Artificial Sequence
  Synthetic
aauuucugcaggggauaaau

SEQ ID NO: 813141 - RNA, 20 nt, Artificial Sequence
  Synthetic
aaccuuuuuuuuggauaaau

SEQ ID NO: 813142 - RNA, 20 nt, Artificial Sequence
  Synthetic
uauauagaauaaauauaaau

SEQ ID NO: 813143 - RNA, 20 nt, Artificial Sequence
  Synthetic
ccaagauuuccaauauaaau

SEQ ID NO: 813144 - RNA, 20 nt, Artificial Sequence
  Synthetic
acuuuaaagauaauauaaau

SEQ ID NO: 813145 - RNA, 20 nt, Artificial Sequence
  Synthetic
aaauagcuuaucauauaaau

SEQ ID NO: 813146 - RNA, 20 nt, Artificial Sequence
  Synthetic
uaagaucacaauauauaaau

SEQ ID NO: 813147 - RNA, 20 nt, Artificial Sequence
  Synthetic
aacaaaggagauauauaaau

SEQ ID NO: 813148 - RNA, 20 nt, Artificial Sequence
  Synthetic
aagugcuuugaacuauaaau

SEQ ID NO: 813149 - RNA, 20 nt, Artificial Sequence
  Synthetic
aaguuaucuauccuauaaau

SEQ ID NO: 813150 - RNA, 20 nt, Artificial Sequence
  Synthetic
aaaacugaugagcuauaaau

SEQ ID NO: 813151 - RNA, 20 nt, Artificial Sequence
  Synthetic
auccagucuuaguuauaaau

SEQ ID NO: 813152 - RNA, 20 nt, Artificial Sequence
  Synthetic
agccuagagaguuuauaaau

SEQ ID NO: 813153 - RNA, 20 nt, Artificial Sequence
  Synthetic
caaggguaugguuuauaaau

SEQ ID NO: 813154 - RNA, 20 nt, Artificial Sequence
  Synthetic
ucucuuggcuguuacuaaau

SEQ ID NO: 813155 - RNA, 20 nt, Artificial Sequence
  Synthetic
uuggcagggucuuccuaaau

SEQ ID NO: 813156 - RNA, 20 nt, Artificial Sequence
  Synthetic
cuaaugcuuuauggcuaaau

SEQ ID NO: 813157 - RNA, 20 nt, Artificial Sequence
  Synthetic
agacucaacuuuggcuaaau

SEQ ID NO: 813158 - RNA, 20 nt, Artificial Sequence
  Synthetic
uucuuucaaaaaugcuaaau

SEQ ID NO: 813159 - RNA, 20 nt, Artificial Sequence
  Synthetic
ucuauuuuaguaugcuaaau

SEQ ID NO: 813160 - RNA, 20 nt, Artificial Sequence
  Synthetic
cugcuuuuaaacugcuaaau

SEQ ID NO: 813161 - RNA, 20 nt, Artificial Sequence
  Synthetic
aguuuccuccuuugcuaaau

SEQ ID NO: 813162 - RNA, 20 nt, Artificial Sequence
  Synthetic
cauaaaaucuaaaucuaaau

SEQ ID NO: 813163 - RNA, 20 nt, Artificial Sequence
  Synthetic
ucuauuucccauaucuaaau

SEQ ID NO: 813164 - RNA, 20 nt, Artificial Sequence
  Synthetic
ugcuaaauuacacucuaaau

SEQ ID NO: 813165 - RNA, 20 nt, Artificial Sequence
  Synthetic
cucaggaggcagcucuaaau

SEQ ID NO: 813166 - RNA, 20 nt, Artificial Sequence
  Synthetic
agauuauuacauuucuaaau

SEQ ID NO: 813167 - RNA, 20 nt, Artificial Sequence
  Synthetic
aagaaaaugcauuucuaaau

SEQ ID NO: 813168 - RNA, 20 nt, Artificial Sequence
  Synthetic
uugacauuuauuuucuaaau

SEQ ID NO: 813169 - RNA, 20 nt, Artificial Sequence
  Synthetic
uuuugaugucccaaguaaau

SEQ ID NO: 813170 - RNA, 20 nt, Artificial Sequence
  Synthetic
aacagacuaauacaguaaau

SEQ ID NO: 813171 - RNA, 20 nt, Artificial Sequence
  Synthetic
aacggacuaauacaguaaau

SEQ ID NO: 813172 - RNA, 20 nt, Artificial Sequence
  Synthetic
ucacaaauacuucaguaaau

SEQ ID NO: 813173 - RNA, 20 nt, Artificial Sequence
  Synthetic
aaguuguugucugaguaaau

SEQ ID NO: 813174 - RNA, 20 nt, Artificial Sequence
  Synthetic
uaucaauaguuauaguaaau

SEQ ID NO: 813175 - RNA, 20 nt, Artificial Sequence
  Synthetic
aauucaaugagguaguaaau

SEQ ID NO: 813176 - RNA, 20 nt, Artificial Sequence
  Synthetic
ucaauuauaggggcguaaau

SEQ ID NO: 813177 - RNA, 20 nt, Artificial Sequence
  Synthetic
cuucauuuaaaaagguaaau

SEQ ID NO: 813178 - RNA, 20 nt, Artificial Sequence
  Synthetic
aaacaauuuugaagguaaau

SEQ ID NO: 813179 - RNA, 20 nt, Artificial Sequence
  Synthetic
aaacuugaaaauagguaaau

SEQ ID NO: 813180 - RNA, 20 nt, Artificial Sequence
  Synthetic
aucuguguaacaugguaaau

SEQ ID NO: 813181 - RNA, 20 nt, Artificial Sequence
  Synthetic
acuucaaacuuaugguaaau

SEQ ID NO: 813182 - RNA, 20 nt, Artificial Sequence
  Synthetic
uauuaacuuuaaauguaaau

SEQ ID NO: 813183 - RNA, 20 nt, Artificial Sequence
  Synthetic
aaaaaauuaaugcuguaaau

SEQ ID NO: 813184 - RNA, 20 nt, Artificial Sequence
  Synthetic
agauucugagcuguguaaau

SEQ ID NO: 813185 - RNA, 20 nt, Artificial Sequence
  Synthetic
auagauugugguguguaaau

SEQ ID NO: 813186 - RNA, 20 nt, Artificial Sequence
  Synthetic
caagaacauacuuuguaaau

SEQ ID NO: 813187 - RNA, 20 nt, Artificial Sequence
  Synthetic
uggcauuauaaaaauuaaau

SEQ ID NO: 813188 - RNA, 20 nt, Artificial Sequence
  Synthetic
ugcauucauugaaauuaaau

SEQ ID NO: 813189 - RNA, 20 nt, Artificial Sequence
  Synthetic
uuaauaugucagaauuaaau

SEQ ID NO: 813190 - RNA, 20 nt, Artificial Sequence
  Synthetic
uguacugauuauaauuaaau

SEQ ID NO: 813191 - RNA, 20 nt, Artificial Sequence
  Synthetic
aguuguuuuauuaauuaaau

SEQ ID NO: 813192 - RNA, 20 nt, Artificial Sequence
  Synthetic
uucaugauauuuaauuaaau

SEQ ID NO: 813193 - RNA, 20 nt, Artificial Sequence
  Synthetic
aaacucauauugcauuaaau

SEQ ID NO: 813194 - RNA, 20 nt, Artificial Sequence
  Synthetic
acuugggguuaagauuaaau

SEQ ID NO: 813195 - RNA, 20 nt, Artificial Sequence
  Synthetic
uuuaacuaaagugauuaaau

SEQ ID NO: 813196 - RNA, 20 nt, Artificial Sequence
  Synthetic
ugacuaauuagauauuaaau

SEQ ID NO: 813197 - RNA, 20 nt, Artificial Sequence
  Synthetic
ccuaaaaauguguauuaaau

SEQ ID NO: 813198 - RNA, 20 nt, Artificial Sequence
  Synthetic
cccaacaccauuuauuaaau

SEQ ID NO: 813199 - RNA, 20 nt, Artificial Sequence
  Synthetic
cccgacaccauuuauuaaau

SEQ ID NO: 813200 - RNA, 20 nt, Artificial Sequence
  Synthetic
cccagcaccauuuauuaaau

SEQ ID NO: 813201 - RNA, 20 nt, Artificial Sequence
  Synthetic
cucaugaugcuuuauuaaau

SEQ ID NO: 813202 - RNA, 20 nt, Artificial Sequence
  Synthetic
cccagcaccguuuauuaaau

SEQ ID NO: 813203 - RNA, 20 nt, Artificial Sequence
  Synthetic
auaaguaauaucucuuaaau

SEQ ID NO: 813204 - RNA, 20 nt, Artificial Sequence
  Synthetic
uaaggcuuuuuuucuuaaau

SEQ ID NO: 813205 - RNA, 20 nt, Artificial Sequence
  Synthetic
aacacuuaagaaaguuaaau

SEQ ID NO: 813206 - RNA, 20 nt, Artificial Sequence
  Synthetic
uaaauaaccuaaaguuaaau

SEQ ID NO: 813207 - RNA, 20 nt, Artificial Sequence
  Synthetic
auaugcaggagaaguuaaau

SEQ ID NO: 813208 - RNA, 20 nt, Artificial Sequence
  Synthetic
aaaucacaggucaguuaaau

SEQ ID NO: 813209 - RNA, 20 nt, Artificial Sequence
  Synthetic
cuaaauuuuacauguuaaau

SEQ ID NO: 813210 - RNA, 20 nt, Artificial Sequence
  Synthetic
auuuuauccauauguuaaau

SEQ ID NO: 813211 - RNA, 20 nt, Artificial Sequence
  Synthetic
caacauuuucucuguuaaau

SEQ ID NO: 813212 - RNA, 20 nt, Artificial Sequence
  Synthetic
aagaaaaauuauuguuaaau

SEQ ID NO: 813213 - RNA, 20 nt, Artificial Sequence
  Synthetic
cugaagaauauuuguuaaau

SEQ ID NO: 813214 - RNA, 20 nt, Artificial Sequence
  Synthetic
aaaauaauggaaauuuaaau

SEQ ID NO: 813215 - RNA, 20 nt, Artificial Sequence
  Synthetic
cagagguccuaaauuuaaau

SEQ ID NO: 813216 - RNA, 20 nt, Artificial Sequence
  Synthetic
aucugacuuuccauuuaaau

SEQ ID NO: 813217 - RNA, 20 nt, Artificial Sequence
  Synthetic
augaaauaguggauuuaaau

SEQ ID NO: 813218 - RNA, 20 nt, Artificial Sequence
  Synthetic
aggacuuaaaguauuuaaau

SEQ ID NO: 813219 - RNA, 20 nt, Artificial Sequence
  Synthetic
aaaucuauauuuauuuaaau

SEQ ID NO: 813220 - RNA, 20 nt, Artificial Sequence
  Synthetic
aauaaacaguuacuuuaaau

SEQ ID NO: 813221 - RNA, 20 nt, Artificial Sequence
  Synthetic
aaacuacaaacucuuuaaau

SEQ ID NO: 813222 - RNA, 20 nt, Artificial Sequence
  Synthetic
auaugaguggaaguuuaaau

SEQ ID NO: 813223 - RNA, 20 nt, Artificial Sequence
  Synthetic
aguacauuccaauuuuaaau

SEQ ID NO: 813224 - RNA, 20 nt, Artificial Sequence
  Synthetic
uccuaauguagauuuuaaau

SEQ ID NO: 813225 - RNA, 20 nt, Artificial Sequence
  Synthetic
cuuaggcucaucuuuuaaau

SEQ ID NO: 813226 - RNA, 20 nt, Artificial Sequence
  Synthetic
uuuggaugaauguuuuaaau

SEQ ID NO: 813227 - RNA, 20 nt, Artificial Sequence
  Synthetic
cucgcugaaaauuuuuaaau

SEQ ID NO: 813228 - RNA, 20 nt, Artificial Sequence
  Synthetic
auuuauuguauuuuuuaaau

SEQ ID NO: 813229 - RNA, 20 nt, Artificial Sequence
  Synthetic
auugcuaugccccaaacaau

SEQ ID NO: 813230 - RNA, 20 nt, Artificial Sequence
  Synthetic
auucugaagcuccaaacaau

SEQ ID NO: 813231 - RNA, 20 nt, Artificial Sequence
  Synthetic
cagacauuguacuaaacaau

SEQ ID NO: 813232 - RNA, 20 nt, Artificial Sequence
  Synthetic
cugaaacuauucuaaacaau

SEQ ID NO: 813233 - RNA, 20 nt, Artificial Sequence
  Synthetic
cuggccauuuuuuaaacaau

SEQ ID NO: 813234 - RNA, 20 nt, Artificial Sequence
  Synthetic
aauuguaauauaccaacaau

SEQ ID NO: 813235 - RNA, 20 nt, Artificial Sequence
  Synthetic
acaaagauuugaagaacaau

SEQ ID NO: 813236 - RNA, 20 nt, Artificial Sequence
  Synthetic
cccacacaagggagaacaau

SEQ ID NO: 813237 - RNA, 20 nt, Artificial Sequence
  Synthetic
uaaaucaacauaugaacaau

SEQ ID NO: 813238 - RNA, 20 nt, Artificial Sequence
  Synthetic
aggcuugagaguugaacaau

SEQ ID NO: 813239 - RNA, 20 nt, Artificial Sequence
  Synthetic
uugagauuuuuaauaacaau

SEQ ID NO: 813240 - RNA, 20 nt, Artificial Sequence
  Synthetic
ugagagcuagguuuaacaau

SEQ ID NO: 813241 - RNA, 20 nt, Artificial Sequence
  Synthetic
uuucaguggcuuaacacaau

SEQ ID NO: 813242 - RNA, 20 nt, Artificial Sequence
  Synthetic
acaggggaacaacacacaau

SEQ ID NO: 813243 - RNA, 20 nt, Artificial Sequence
  Synthetic
agguagcaagaacacacaau

SEQ ID NO: 813244 - RNA, 20 nt, Artificial Sequence
  Synthetic
uaaacacacgcacacacaau

SEQ ID NO: 813245 - RNA, 20 nt, Artificial Sequence
  Synthetic
ugggaggagaugcacacaau

SEQ ID NO: 813246 - RNA, 20 nt, Artificial Sequence
  Synthetic
uauaguuaaaaucacacaau

SEQ ID NO: 813247 - RNA, 20 nt, Artificial Sequence
  Synthetic
agaagggaaaacuacacaau

SEQ ID NO: 813248 - RNA, 20 nt, Artificial Sequence
  Synthetic
uaguaagcauaguacacaau

SEQ ID NO: 813249 - RNA, 20 nt, Artificial Sequence
  Synthetic
cacagauccugguacacaau

SEQ ID NO: 813250 - RNA, 20 nt, Artificial Sequence
  Synthetic
uuauucaggauaaccacaau

SEQ ID NO: 813251 - RNA, 20 nt, Artificial Sequence
  Synthetic
auccaaucucauuccacaau

SEQ ID NO: 813252 - RNA, 20 nt, Artificial Sequence
  Synthetic
cuacuguuucauagcacaau

SEQ ID NO: 813253 - RNA, 20 nt, Artificial Sequence
  Synthetic
cauuaaugaaaccucacaau

SEQ ID NO: 813254 - RNA, 20 nt, Artificial Sequence
  Synthetic
ucguguggacaguucacaau

SEQ ID NO: 813255 - RNA, 20 nt, Artificial Sequence
  Synthetic
uugcaugaguaguucacaau

SEQ ID NO: 813256 - RNA, 20 nt, Artificial Sequence
  Synthetic
acugcuuuguaguucacaau

SEQ ID NO: 813257 - RNA, 20 nt, Artificial Sequence
  Synthetic
aaacuucccuaaaagacaau

SEQ ID NO: 813258 - RNA, 20 nt, Artificial Sequence
  Synthetic
auguuaagcgccaagacaau

SEQ ID NO: 813259 - RNA, 20 nt, Artificial Sequence
  Synthetic
agauucaaguccaagacaau

SEQ ID NO: 813260 - RNA, 20 nt, Artificial Sequence
  Synthetic
auguuaauaggcaagacaau

SEQ ID NO: 813261 - RNA, 20 nt, Artificial Sequence
  Synthetic
auguagaaugagaagacaau

SEQ ID NO: 813262 - RNA, 20 nt, Artificial Sequence
  Synthetic
agauuuugggcugagacaau

SEQ ID NO: 813263 - RNA, 20 nt, Artificial Sequence
  Synthetic
ugaggugacuccuagacaau

SEQ ID NO: 813264 - RNA, 20 nt, Artificial Sequence
  Synthetic
aucucaauaauuuagacaau

SEQ ID NO: 813265 - RNA, 20 nt, Artificial Sequence
  Synthetic
cuuuaggaugaggugacaau

SEQ ID NO: 813266 - RNA, 20 nt, Artificial Sequence
  Synthetic
uuauuugacauggugacaau

SEQ ID NO: 813267 - RNA, 20 nt, Artificial Sequence
  Synthetic
uuuuaaaaugcauugacaau

SEQ ID NO: 813268 - RNA, 20 nt, Artificial Sequence
  Synthetic
uaucucaaucauuugacaau

SEQ ID NO: 813269 - RNA, 20 nt, Artificial Sequence
  Synthetic
uuuuuguguaauaauacaau

SEQ ID NO: 813270 - RNA, 20 nt, Artificial Sequence
  Synthetic
ccuacuuauagacauacaau

SEQ ID NO: 813271 - RNA, 20 nt, Artificial Sequence
  Synthetic
uuaacauuucuucauacaau

SEQ ID NO: 813272 - RNA, 20 nt, Artificial Sequence
  Synthetic
aaacaaagaguagauacaau

SEQ ID NO: 813273 - RNA, 20 nt, Artificial Sequence
  Synthetic
aguuacuuccaggauacaau

SEQ ID NO: 813274 - RNA, 20 nt, Artificial Sequence
  Synthetic
aggcauaagaaugauacaau

SEQ ID NO: 813275 - RNA, 20 nt, Artificial Sequence
  Synthetic
ucuauauguccauauacaau

SEQ ID NO: 813276 - RNA, 20 nt, Artificial Sequence
  Synthetic
cuuuucuucucuuauacaau

SEQ ID NO: 813277 - RNA, 20 nt, Artificial Sequence
  Synthetic
auacaaagcaaaacuacaau

SEQ ID NO: 813278 - RNA, 20 nt, Artificial Sequence
  Synthetic
uugcaauauaaaccuacaau

SEQ ID NO: 813279 - RNA, 20 nt, Artificial Sequence
  Synthetic
caauuguaaaauucuacaau

SEQ ID NO: 813280 - RNA, 20 nt, Artificial Sequence
  Synthetic
auauaaauuaauucuacaau

SEQ ID NO: 813281 - RNA, 20 nt, Artificial Sequence
  Synthetic
uaauuucuguauucuacaau

SEQ ID NO: 813282 - RNA, 20 nt, Artificial Sequence
  Synthetic
uuaaauugaaaagguacaau

SEQ ID NO: 813283 - RNA, 20 nt, Artificial Sequence
  Synthetic
uaguauccauguuguacaau

SEQ ID NO: 813284 - RNA, 20 nt, Artificial Sequence
  Synthetic
uuuucuucugcaauuacaau

SEQ ID NO: 813285 - RNA, 20 nt, Artificial Sequence
  Synthetic
cuucacaaaagaauuacaau

SEQ ID NO: 813286 - RNA, 20 nt, Artificial Sequence
  Synthetic
uagccaacaauuauuacaau

SEQ ID NO: 813287 - RNA, 20 nt, Artificial Sequence
  Synthetic
caaaauucucaacuuacaau

SEQ ID NO: 813288 - RNA, 20 nt, Artificial Sequence
  Synthetic
uaaaagucaaugcuuacaau

SEQ ID NO: 813289 - RNA, 20 nt, Artificial Sequence
  Synthetic
uacuagauauaucuuacaau

SEQ ID NO: 813290 - RNA, 20 nt, Artificial Sequence
  Synthetic
cugauguaauuguuuacaau

SEQ ID NO: 813291 - RNA, 20 nt, Artificial Sequence
  Synthetic
ucucacuccacacacccaau

SEQ ID NO: 813292 - RNA, 20 nt, Artificial Sequence
  Synthetic
agucaauucccagccccaau

SEQ ID NO: 813293 - RNA, 20 nt, Artificial Sequence
  Synthetic
ugccuccccuuccucccaau

SEQ ID NO: 813294 - RNA, 20 nt, Artificial Sequence
  Synthetic
uuguuacuuuauuucccaau

SEQ ID NO: 813295 - RNA, 20 nt, Artificial Sequence
  Synthetic
acgacccaaccccagccaau

SEQ ID NO: 813296 - RNA, 20 nt, Artificial Sequence
  Synthetic
aaaugcugggcccagccaau

SEQ ID NO: 813297 - RNA, 20 nt, Artificial Sequence
  Synthetic
cacacucuuaaauagccaau

SEQ ID NO: 813298 - RNA, 20 nt, Artificial Sequence
  Synthetic
uaaaacuugcuuuagccaau

SEQ ID NO: 813299 - RNA, 20 nt, Artificial Sequence
  Synthetic
uuuaggcuuugcaggccaau

SEQ ID NO: 813300 - RNA, 20 nt, Artificial Sequence
  Synthetic
uuuugaugauucaggccaau

SEQ ID NO: 813301 - RNA, 20 nt, Artificial Sequence
  Synthetic
uaugccuggcuuuggccaau

SEQ ID NO: 813302 - RNA, 20 nt, Artificial Sequence
  Synthetic
uuaucuauucaucugccaau

SEQ ID NO: 813303 - RNA, 20 nt, Artificial Sequence
  Synthetic
aacaacauccuagugccaau

SEQ ID NO: 813304 - RNA, 20 nt, Artificial Sequence
  Synthetic
uaaucaaaaucuuugccaau

SEQ ID NO: 813305 - RNA, 20 nt, Artificial Sequence
  Synthetic
cuuuacgugugaaauccaau

SEQ ID NO: 813306 - RNA, 20 nt, Artificial Sequence
  Synthetic
augcaagucuuaaauccaau

SEQ ID NO: 813307 - RNA, 20 nt, Artificial Sequence
  Synthetic
uauuuaacauaugcuccaau

SEQ ID NO: 813308 - RNA, 20 nt, Artificial Sequence
  Synthetic
cuaaaacagggcuuuccaau

SEQ ID NO: 813309 - RNA, 20 nt, Artificial Sequence
  Synthetic
cggaaacagugaaaagcaau

SEQ ID NO: 813310 - RNA, 20 nt, Artificial Sequence
  Synthetic
accugagaaaaacaagcaau

SEQ ID NO: 813311 - RNA, 20 nt, Artificial Sequence
  Synthetic
accugaggaaaacaagcaau

SEQ ID NO: 813312 - RNA, 20 nt, Artificial Sequence
  Synthetic
caucuuaaacaagaagcaau

SEQ ID NO: 813313 - RNA, 20 nt, Artificial Sequence
  Synthetic
aaaauugucacagaagcaau

SEQ ID NO: 813314 - RNA, 20 nt, Artificial Sequence
  Synthetic
uaaaguauaaaggcagcaau

SEQ ID NO: 813315 - RNA, 20 nt, Artificial Sequence
  Synthetic
uucuauagaaacagagcaau

SEQ ID NO: 813316 - RNA, 20 nt, Artificial Sequence
  Synthetic
uuacuaagugauagagcaau

SEQ ID NO: 813317 - RNA, 20 nt, Artificial Sequence
  Synthetic
cuauucauucacugagcaau

SEQ ID NO: 813318 - RNA, 20 nt, Artificial Sequence
  Synthetic
uacucauuuccaauagcaau

SEQ ID NO: 813319 - RNA, 20 nt, Artificial Sequence
  Synthetic
ugauaacagaaaguagcaau

SEQ ID NO: 813320 - RNA, 20 nt, Artificial Sequence
  Synthetic
auguuaaucaccaaggcaau

SEQ ID NO: 813321 - RNA, 20 nt, Artificial Sequence
  Synthetic
agaagauagacacaggcaau

SEQ ID NO: 813322 - RNA, 20 nt, Artificial Sequence
  Synthetic
uuuugacacaggcaggcaau

SEQ ID NO: 813323 - RNA, 20 nt, Artificial Sequence
  Synthetic
uacugaauacuucaggcaau

SEQ ID NO: 813324 - RNA, 20 nt, Artificial Sequence
  Synthetic
agagaccagguggaggcaau

SEQ ID NO: 813325 - RNA, 20 nt, Artificial Sequence
  Synthetic
acuaaagaggcugaggcaau

SEQ ID NO: 813326 - RNA, 20 nt, Artificial Sequence
  Synthetic
cuacuuauuaccuaggcaau

SEQ ID NO: 813327 - RNA, 20 nt, Artificial Sequence
  Synthetic
uguugggcuucuuaggcaau

SEQ ID NO: 813328 - RNA, 20 nt, Artificial Sequence
  Synthetic
aggagggcaaccucggcaau

SEQ ID NO: 813329 - RNA, 20 nt, Artificial Sequence
  Synthetic
caggucuucaagggggcaau

SEQ ID NO: 813330 - RNA, 20 nt, Artificial Sequence
  Synthetic
uuauuuacaaaaauggcaau

SEQ ID NO: 813331 - RNA, 20 nt, Artificial Sequence
  Synthetic
caccaaauaaaaauggcaau

SEQ ID NO: 813332 - RNA, 20 nt, Artificial Sequence
  Synthetic
auccagucccaaauggcaau

SEQ ID NO: 813333 - RNA, 20 nt, Artificial Sequence
  Synthetic
ugcaacaacauggaugcaau

SEQ ID NO: 813334 - RNA, 20 nt, Artificial Sequence
  Synthetic
aauuuuuuagaugaugcaau

SEQ ID NO: 813335 - RNA, 20 nt, Artificial Sequence
  Synthetic
auauugcauauauaugcaau

SEQ ID NO: 813336 - RNA, 20 nt, Artificial Sequence
  Synthetic
ugacaaugccaaacugcaau

SEQ ID NO: 813337 - RNA, 20 nt, Artificial Sequence
  Synthetic
auggugagaugcugugcaau

SEQ ID NO: 813338 - RNA, 20 nt, Artificial Sequence
  Synthetic
acaugcucugauugugcaau

SEQ ID NO: 813339 - RNA, 20 nt, Artificial Sequence
  Synthetic
accauggauaccauugcaau

SEQ ID NO: 813340 - RNA, 20 nt, Artificial Sequence
  Synthetic
cuauuuucuccccuugcaau

SEQ ID NO: 813341 - RNA, 20 nt, Artificial Sequence
  Synthetic
acagacccagacuuugcaau

SEQ ID NO: 813342 - RNA, 20 nt, Artificial Sequence
  Synthetic
uucucccuccaaaaaucaau

SEQ ID NO: 813343 - RNA, 20 nt, Artificial Sequence
  Synthetic
agcaauucaguaaaaucaau

SEQ ID NO: 813344 - RNA, 20 nt, Artificial Sequence
  Synthetic
uaaaucuuuguuaaaucaau

SEQ ID NO: 813345 - RNA, 20 nt, Artificial Sequence
  Synthetic
auuauucacauggaaucaau

SEQ ID NO: 813346 - RNA, 20 nt, Artificial Sequence
  Synthetic
agauaccucauggaaucaau

SEQ ID NO: 813347 - RNA, 20 nt, Artificial Sequence
  Synthetic
uaaaacacagaguaaucaau

SEQ ID NO: 813348 - RNA, 20 nt, Artificial Sequence
  Synthetic
caccuuucaaaaacaucaau

SEQ ID NO: 813349 - RNA, 20 nt, Artificial Sequence
  Synthetic
uuuaaauuuguaccaucaau

SEQ ID NO: 813350 - RNA, 20 nt, Artificial Sequence
  Synthetic
uauauauuuagaagaucaau

SEQ ID NO: 813351 - RNA, 20 nt, Artificial Sequence
  Synthetic
uuucugguucucagaucaau

SEQ ID NO: 813352 - RNA, 20 nt, Artificial Sequence
  Synthetic
cauagagucuguagaucaau

SEQ ID NO: 813353 - RNA, 20 nt, Artificial Sequence
  Synthetic
uuuaaaauguagauaucaau

SEQ ID NO: 813354 - RNA, 20 nt, Artificial Sequence
  Synthetic
aagauacuaucucuaucaau

SEQ ID NO: 813355 - RNA, 20 nt, Artificial Sequence
  Synthetic
cagaguaucugggacucaau

SEQ ID NO: 813356 - RNA, 20 nt, Artificial Sequence
  Synthetic
ugucuaggagucaccucaau

SEQ ID NO: 813357 - RNA, 20 nt, Artificial Sequence
  Synthetic
ucaaaacuuuuccccucaau

SEQ ID NO: 813358 - RNA, 20 nt, Artificial Sequence
  Synthetic
cuaccuucuaagagcucaau

SEQ ID NO: 813359 - RNA, 20 nt, Artificial Sequence
  Synthetic
aauccuagccucugcucaau

SEQ ID NO: 813360 - RNA, 20 nt, Artificial Sequence
  Synthetic
cuguauugguuuugcucaau

SEQ ID NO: 813361 - RNA, 20 nt, Artificial Sequence
  Synthetic
cagucaagcccaaagucaau

SEQ ID NO: 813362 - RNA, 20 nt, Artificial Sequence
  Synthetic
uuauauauuaaagagucaau

SEQ ID NO: 813363 - RNA, 20 nt, Artificial Sequence
  Synthetic
agugagauuauugagucaau

SEQ ID NO: 813364 - RNA, 20 nt, Artificial Sequence
  Synthetic
cucagccuggagaggucaau

SEQ ID NO: 813365 - RNA, 20 nt, Artificial Sequence
  Synthetic
uucccauauguuuggucaau

SEQ ID NO: 813366 - RNA, 20 nt, Artificial Sequence
  Synthetic
cuuccugaauaaaugucaau

SEQ ID NO: 813367 - RNA, 20 nt, Artificial Sequence
  Synthetic
cagauuucuuaaaugucaau

SEQ ID NO: 813368 - RNA, 20 nt, Artificial Sequence
  Synthetic
acauauguacaagugucaau

SEQ ID NO: 813369 - RNA, 20 nt, Artificial Sequence
  Synthetic
auucgcaugacugugucaau

SEQ ID NO: 813370 - RNA, 20 nt, Artificial Sequence
  Synthetic
auggggagaggauugucaau

SEQ ID NO: 813371 - RNA, 20 nt, Artificial Sequence
  Synthetic
auaguuauaucaaauucaau

SEQ ID NO: 813372 - RNA, 20 nt, Artificial Sequence
  Synthetic
uugacauguucaaauucaau

SEQ ID NO: 813373 - RNA, 20 nt, Artificial Sequence
  Synthetic
uuaaauacaaauaauucaau

SEQ ID NO: 813374 - RNA, 20 nt, Artificial Sequence
  Synthetic
aacucccacucacauucaau

SEQ ID NO: 813375 - RNA, 20 nt, Artificial Sequence
  Synthetic
cacacagacacugauucaau

SEQ ID NO: 813376 - RNA, 20 nt, Artificial Sequence
  Synthetic
uccauagauucugauucaau

SEQ ID NO: 813377 - RNA, 20 nt, Artificial Sequence
  Synthetic
uuaagcccuuccuauucaau

SEQ ID NO: 813378 - RNA, 20 nt, Artificial Sequence
  Synthetic
uggagacagaguuauucaau

SEQ ID NO: 813379 - RNA, 20 nt, Artificial Sequence
  Synthetic
augacucccucugcuucaau

SEQ ID NO: 813380 - RNA, 20 nt, Artificial Sequence
  Synthetic
uggccauuccugaguucaau

SEQ ID NO: 813381 - RNA, 20 nt, Artificial Sequence
  Synthetic
caguuugcucaagguucaau

SEQ ID NO: 813382 - RNA, 20 nt, Artificial Sequence
  Synthetic
auagauuguauauguucaau

SEQ ID NO: 813383 - RNA, 20 nt, Artificial Sequence
  Synthetic
auagaacugcacuguucaau

SEQ ID NO: 813384 - RNA, 20 nt, Artificial Sequence
  Synthetic
aggagauagugguguucaau

SEQ ID NO: 813385 - RNA, 20 nt, Artificial Sequence
  Synthetic
aaugcugagaauuguucaau

SEQ ID NO: 813386 - RNA, 20 nt, Artificial Sequence
  Synthetic
auccuacaguucauuucaau

SEQ ID NO: 813387 - RNA, 20 nt, Artificial Sequence
  Synthetic
uuuaaguuuuuucuuucaau

SEQ ID NO: 813388 - RNA, 20 nt, Artificial Sequence
  Synthetic
uagaggaugaaauuuucaau

SEQ ID NO: 813389 - RNA, 20 nt, Artificial Sequence
  Synthetic
acccucagaucauuuucaau

SEQ ID NO: 813390 - RNA, 20 nt, Artificial Sequence
  Synthetic
uauauaaaacaaaaaagaau

SEQ ID NO: 813391 - RNA, 20 nt, Artificial Sequence
  Synthetic
auccuuuagaacaaaagaau

SEQ ID NO: 813392 - RNA, 20 nt, Artificial Sequence
  Synthetic
aaauuuaaaaaagaaagaau

SEQ ID NO: 813393 - RNA, 20 nt, Artificial Sequence
  Synthetic
aaauguaagagugaaagaau

SEQ ID NO: 813394 - RNA, 20 nt, Artificial Sequence
  Synthetic
uuuuugcucuuauaaagaau

SEQ ID NO: 813395 - RNA, 20 nt, Artificial Sequence
  Synthetic
uacagggagagguaaagaau

SEQ ID NO: 813396 - RNA, 20 nt, Artificial Sequence
  Synthetic
uuauguaaaguguaaagaau

SEQ ID NO: 813397 - RNA, 20 nt, Artificial Sequence
  Synthetic
cuuuuauucaugacaagaau

SEQ ID NO: 813398 - RNA, 20 nt, Artificial Sequence
  Synthetic
cuaauccagaaaucaagaau

SEQ ID NO: 813399 - RNA, 20 nt, Artificial Sequence
  Synthetic
cuguugugaggcucaagaau

SEQ ID NO: 813400 - RNA, 20 nt, Artificial Sequence
  Synthetic
auggagauguagucaagaau

SEQ ID NO: 813401 - RNA, 20 nt, Artificial Sequence
  Synthetic
ccagacauucaaagaagaau

SEQ ID NO: 813402 - RNA, 20 nt, Artificial Sequence
  Synthetic
aacuaauaccugagaagaau

SEQ ID NO: 813403 - RNA, 20 nt, Artificial Sequence
  Synthetic
aaaggagggucaggaagaau

SEQ ID NO: 813404 - RNA, 20 nt, Artificial Sequence
  Synthetic
cccuaccccaagggaagaau

SEQ ID NO: 813405 - RNA, 20 nt, Artificial Sequence
  Synthetic
uaauacaacuggggaagaau

SEQ ID NO: 813406 - RNA, 20 nt, Artificial Sequence
  Synthetic
aggauccugaaaugaagaau

SEQ ID NO: 813407 - RNA, 20 nt, Artificial Sequence
  Synthetic
cugaagcauggaugaagaau

SEQ ID NO: 813408 - RNA, 20 nt, Artificial Sequence
  Synthetic
caaaggagagucugaagaau

SEQ ID NO: 813409 - RNA, 20 nt, Artificial Sequence
  Synthetic
acuaaugucuaacuaagaau

SEQ ID NO: 813410 - RNA, 20 nt, Artificial Sequence
  Synthetic
auggcacacaagcuaagaau

SEQ ID NO: 813411 - RNA, 20 nt, Artificial Sequence
  Synthetic
uaauuucaugcucuaagaau

SEQ ID NO: 813412 - RNA, 20 nt, Artificial Sequence
  Synthetic
ugacucuagggcguaagaau

SEQ ID NO: 813413 - RNA, 20 nt, Artificial Sequence
  Synthetic
cuaagcaacauuuuaagaau

SEQ ID NO: 813414 - RNA, 20 nt, Artificial Sequence
  Synthetic
uucauacaacugaacagaau

SEQ ID NO: 813415 - RNA, 20 nt, Artificial Sequence
  Synthetic
uuuuuagugagucacagaau

SEQ ID NO: 813416 - RNA, 20 nt, Artificial Sequence
  Synthetic
aaugacuuucuucacagaau

SEQ ID NO: 813417 - RNA, 20 nt, Artificial Sequence
  Synthetic
aaugccuuucuucacagaau

SEQ ID NO: 813418 - RNA, 20 nt, Artificial Sequence
  Synthetic
uguaagauaguagacagaau

SEQ ID NO: 813419 - RNA, 20 nt, Artificial Sequence
  Synthetic
ugauuuuguaaaaccagaau

SEQ ID NO: 813420 - RNA, 20 nt, Artificial Sequence
  Synthetic
cacugugaucaaagcagaau

SEQ ID NO: 813421 - RNA, 20 nt, Artificial Sequence
  Synthetic
acaugagauauaugcagaau

SEQ ID NO: 813422 - RNA, 20 nt, Artificial Sequence
  Synthetic
ugcaauguggaaaucagaau

SEQ ID NO: 813423 - RNA, 20 nt, Artificial Sequence
  Synthetic
uaguugggagucaucagaau

SEQ ID NO: 813424 - RNA, 20 nt, Artificial Sequence
  Synthetic
acuguggcugggaucagaau

SEQ ID NO: 813425 - RNA, 20 nt, Artificial Sequence
  Synthetic
auauuguugugucucagaau

SEQ ID NO: 813426 - RNA, 20 nt, Artificial Sequence
  Synthetic
ucuguugugggcuucagaau

SEQ ID NO: 813427 - RNA, 20 nt, Artificial Sequence
  Synthetic
caagggaguuguuucagaau

SEQ ID NO: 813428 - RNA, 20 nt, Artificial Sequence
  Synthetic
aauggaaaccaaaagagaau

SEQ ID NO: 813429 - RNA, 20 nt, Artificial Sequence
  Synthetic
uacaguuacccaaagagaau

SEQ ID NO: 813430 - RNA, 20 nt, Artificial Sequence
  Synthetic
uagcuagagccaaagagaau

SEQ ID NO: 813431 - RNA, 20 nt, Artificial Sequence
  Synthetic
ucuucuagaaucaagagaau

SEQ ID NO: 813432 - RNA, 20 nt, Artificial Sequence
  Synthetic
ugggcuggagguaagagaau

SEQ ID NO: 813433 - RNA, 20 nt, Artificial Sequence
  Synthetic
aguggccaaaagcagagaau

SEQ ID NO: 813434 - RNA, 20 nt, Artificial Sequence
  Synthetic
agaaauguaaagcagagaau

SEQ ID NO: 813435 - RNA, 20 nt, Artificial Sequence
  Synthetic
ccagagaaauaucagagaau

SEQ ID NO: 813436 - RNA, 20 nt, Artificial Sequence
  Synthetic
aaauuuuaaaaagagagaau

SEQ ID NO: 813437 - RNA, 20 nt, Artificial Sequence
  Synthetic
ucuggaacuuccuagagaau

SEQ ID NO: 813438 - RNA, 20 nt, Artificial Sequence
  Synthetic
aguaggggaaaagcgagaau

SEQ ID NO: 813439 - RNA, 20 nt, Artificial Sequence
  Synthetic
aacuauuaauucaggagaau

SEQ ID NO: 813440 - RNA, 20 nt, Artificial Sequence
  Synthetic
ugaguaaauaagaggagaau

SEQ ID NO: 813441 - RNA, 20 nt, Artificial Sequence
  Synthetic
aggaaggacagagggagaau

SEQ ID NO: 813442 - RNA, 20 nt, Artificial Sequence
  Synthetic
auagucacaucauggagaau

SEQ ID NO: 813443 - RNA, 20 nt, Artificial Sequence
  Synthetic
uauuaaauggucuggagaau

SEQ ID NO: 813444 - RNA, 20 nt, Artificial Sequence
  Synthetic
accuucacuaaaaugagaau

SEQ ID NO: 813445 - RNA, 20 nt, Artificial Sequence
  Synthetic
cugcuuuuccccaugagaau

SEQ ID NO: 813446 - RNA, 20 nt, Artificial Sequence
  Synthetic
cuggugcgagaccugagaau

SEQ ID NO: 813447 - RNA, 20 nt, Artificial Sequence
  Synthetic
accacagaaguugugagaau

SEQ ID NO: 813448 - RNA, 20 nt, Artificial Sequence
  Synthetic
caaagcuguugcuugagaau

SEQ ID NO: 813449 - RNA, 20 nt, Artificial Sequence
  Synthetic
uuucucaggcucuugagaau

SEQ ID NO: 813450 - RNA, 20 nt, Artificial Sequence
  Synthetic
aaaauagaaauguugagaau

SEQ ID NO: 813451 - RNA, 20 nt, Artificial Sequence
  Synthetic
caguagugauuuuugagaau

SEQ ID NO: 813452 - RNA, 20 nt, Artificial Sequence
  Synthetic
cccuaucuaugacauagaau

SEQ ID NO: 813453 - RNA, 20 nt, Artificial Sequence
  Synthetic
agugacuaacaagauagaau

SEQ ID NO: 813454 - RNA, 20 nt, Artificial Sequence
  Synthetic
auaaagacuauagauagaau

SEQ ID NO: 813455 - RNA, 20 nt, Artificial Sequence
  Synthetic
auuguucaaagugauagaau

SEQ ID NO: 813456 - RNA, 20 nt, Artificial Sequence
  Synthetic
ucaucuuuaauugauagaau

SEQ ID NO: 813457 - RNA, 20 nt, Artificial Sequence
  Synthetic
auaaaagaaggagcuagaau

SEQ ID NO: 813458 - RNA, 20 nt, Artificial Sequence
  Synthetic
ucaggcucuagggcuagaau

SEQ ID NO: 813459 - RNA, 20 nt, Artificial Sequence
  Synthetic
auaggccagaugucuagaau

SEQ ID NO: 813460 - RNA, 20 nt, Artificial Sequence
  Synthetic
ccaaaugaaaauucuagaau

SEQ ID NO: 813461 - RNA, 20 nt, Artificial Sequence
  Synthetic
agugauucaggaaguagaau

SEQ ID NO: 813462 - RNA, 20 nt, Artificial Sequence
  Synthetic
cagaaagaaaauaguagaau

SEQ ID NO: 813463 - RNA, 20 nt, Artificial Sequence
  Synthetic
agaaaugagugagguagaau

SEQ ID NO: 813464 - RNA, 20 nt, Artificial Sequence
  Synthetic
uaacugguggaggguagaau

SEQ ID NO: 813465 - RNA, 20 nt, Artificial Sequence
  Synthetic
caugcacaauaugguagaau

SEQ ID NO: 813466 - RNA, 20 nt, Artificial Sequence
  Synthetic
uaaggaauaaguguuagaau

SEQ ID NO: 813467 - RNA, 20 nt, Artificial Sequence
  Synthetic
acguaacacuaucaacgaau

SEQ ID NO: 813468 - RNA, 20 nt, Artificial Sequence
  Synthetic
caauguuauaaauuccgaau

SEQ ID NO: 813469 - RNA, 20 nt, Artificial Sequence
  Synthetic
uaaauacaccuguuccgaau

SEQ ID NO: 813470 - RNA, 20 nt, Artificial Sequence
  Synthetic
aaggauacuuaaaagcgaau

SEQ ID NO: 813471 - RNA, 20 nt, Artificial Sequence
  Synthetic
cagaacuuugcaaagcgaau

SEQ ID NO: 813472 - RNA, 20 nt, Artificial Sequence
  Synthetic
ucaccuacugcuuugcgaau

SEQ ID NO: 813473 - RNA, 20 nt, Artificial Sequence
  Synthetic
aauagacaaaagauucgaau

SEQ ID NO: 813474 - RNA, 20 nt, Artificial Sequence
  Synthetic
uaaauuauuuuuauucgaau

SEQ ID NO: 813475 - RNA, 20 nt, Artificial Sequence
  Synthetic
ucaauaaaacaaaaaggaau

SEQ ID NO: 813476 - RNA, 20 nt, Artificial Sequence
  Synthetic
ucagaugaaggcaaaggaau

SEQ ID NO: 813477 - RNA, 20 nt, Artificial Sequence
  Synthetic
aaauauauagggaaaggaau

SEQ ID NO: 813478 - RNA, 20 nt, Artificial Sequence
  Synthetic
aauagcaacauuuaaggaau

SEQ ID NO: 813479 - RNA, 20 nt, Artificial Sequence
  Synthetic
ugauaaauggacacaggaau

SEQ ID NO: 813480 - RNA, 20 nt, Artificial Sequence
  Synthetic
uaggcaucuugcacaggaau

SEQ ID NO: 813481 - RNA, 20 nt, Artificial Sequence
  Synthetic
uuuuaaaauauuacaggaau

SEQ ID NO: 813482 - RNA, 20 nt, Artificial Sequence
  Synthetic
ugaauuagaaaaccaggaau

SEQ ID NO: 813483 - RNA, 20 nt, Artificial Sequence
  Synthetic
auauugaguaaaccaggaau

SEQ ID NO: 813484 - RNA, 20 nt, Artificial Sequence
  Synthetic
ucuuuaucugggucaggaau

SEQ ID NO: 813485 - RNA, 20 nt, Artificial Sequence
  Synthetic
ugguuucuaaauagaggaau

SEQ ID NO: 813486 - RNA, 20 nt, Artificial Sequence
  Synthetic
aggugcuuuguaugaggaau

SEQ ID NO: 813487 - RNA, 20 nt, Artificial Sequence
  Synthetic
acucagagucacugaggaau

SEQ ID NO: 813488 - RNA, 20 nt, Artificial Sequence
  Synthetic
cuauucauucacugaggaau

SEQ ID NO: 813489 - RNA, 20 nt, Artificial Sequence
  Synthetic
cauugacauucuauaggaau

SEQ ID NO: 813490 - RNA, 20 nt, Artificial Sequence
  Synthetic
agcucagauaaaguaggaau

SEQ ID NO: 813491 - RNA, 20 nt, Artificial Sequence
  Synthetic
aauuguuggagaguaggaau

SEQ ID NO: 813492 - RNA, 20 nt, Artificial Sequence
  Synthetic
cagaaacucacauuaggaau

SEQ ID NO: 813493 - RNA, 20 nt, Artificial Sequence
  Synthetic
uagccuugugccuuaggaau

SEQ ID NO: 813494 - RNA, 20 nt, Artificial Sequence
  Synthetic
cuaucccuuuguuuaggaau

SEQ ID NO: 813495 - RNA, 20 nt, Artificial Sequence
  Synthetic
auuguugugucucagggaau

SEQ ID NO: 813496 - RNA, 20 nt, Artificial Sequence
  Synthetic
uguuuuucuaauuagggaau

SEQ ID NO: 813497 - RNA, 20 nt, Artificial Sequence
  Synthetic
aaacgcuauguuuagggaau

SEQ ID NO: 813498 - RNA, 20 nt, Artificial Sequence
  Synthetic
cauuuauaauacaggggaau

SEQ ID NO: 813499 - RNA, 20 nt, Artificial Sequence
  Synthetic
acugugcacguuaggggaau

SEQ ID NO: 813500 - RNA, 20 nt, Artificial Sequence
  Synthetic
acccuggcuguugggggaau

SEQ ID NO: 813501 - RNA, 20 nt, Artificial Sequence
  Synthetic
augagaagacaauggggaau

SEQ ID NO: 813502 - RNA, 20 nt, Artificial Sequence
  Synthetic
ccuuccuuguaauggggaau

SEQ ID NO: 813503 - RNA, 20 nt, Artificial Sequence
  Synthetic
uagggcaaccaacugggaau

SEQ ID NO: 813504 - RNA, 20 nt, Artificial Sequence
  Synthetic
aauagguuuggagugggaau

SEQ ID NO: 813505 - RNA, 20 nt, Artificial Sequence
  Synthetic
acugaguugggguugggaau

SEQ ID NO: 813506 - RNA, 20 nt, Artificial Sequence
  Synthetic
aauuuuugcauguugggaau

SEQ ID NO: 813507 - RNA, 20 nt, Artificial Sequence
  Synthetic
aagaagcccguaaauggaau

SEQ ID NO: 813508 - RNA, 20 nt, Artificial Sequence
  Synthetic
cacauugcaaagaauggaau

SEQ ID NO: 813509 - RNA, 20 nt, Artificial Sequence
  Synthetic
uaaaacaguggccauggaau

SEQ ID NO: 813510 - RNA, 20 nt, Artificial Sequence
  Synthetic
acccucucaaggcauggaau

SEQ ID NO: 813511 - RNA, 20 nt, Artificial Sequence
  Synthetic
uacuuuuauuccuauggaau

SEQ ID NO: 813512 - RNA, 20 nt, Artificial Sequence
  Synthetic
aaugccacugaguauggaau

SEQ ID NO: 813513 - RNA, 20 nt, Artificial Sequence
  Synthetic
caggaacuagggccuggaau

SEQ ID NO: 813514 - RNA, 20 nt, Artificial Sequence
  Synthetic
aagacuuacggugcuggaau

SEQ ID NO: 813515 - RNA, 20 nt, Artificial Sequence
  Synthetic
caauuucucccaucuggaau

SEQ ID NO: 813516 - RNA, 20 nt, Artificial Sequence
  Synthetic
uuucaagugagaucuggaau

SEQ ID NO: 813517 - RNA, 20 nt, Artificial Sequence
  Synthetic
aggcagaucuacaguggaau

SEQ ID NO: 813518 - RNA, 20 nt, Artificial Sequence
  Synthetic
ugaaggacugaagguggaau

SEQ ID NO: 813519 - RNA, 20 nt, Artificial Sequence
  Synthetic
auuaggauauuaauuggaau

SEQ ID NO: 813520 - RNA, 20 nt, Artificial Sequence
  Synthetic
caaggaguuuggauuggaau

SEQ ID NO: 813521 - RNA, 20 nt, Artificial Sequence
  Synthetic
uuauuuuuacuuauuggaau

SEQ ID NO: 813522 - RNA, 20 nt, Artificial Sequence
  Synthetic
uagguggaaagaguuggaau

SEQ ID NO: 813523 - RNA, 20 nt, Artificial Sequence
  Synthetic
acaaagauaugguuuggaau

SEQ ID NO: 813524 - RNA, 20 nt, Artificial Sequence
  Synthetic
uauguggucaauuuuggaau

SEQ ID NO: 813525 - RNA, 20 nt, Artificial Sequence
  Synthetic
agaccuaaauauuuuggaau

SEQ ID NO: 813526 - RNA, 20 nt, Artificial Sequence
  Synthetic
aucccacuugcaaaaugaau

SEQ ID NO: 813527 - RNA, 20 nt, Artificial Sequence
  Synthetic
cuagacuugagaaaaugaau

SEQ ID NO: 813528 - RNA, 20 nt, Artificial Sequence
  Synthetic
cagacaaugaauaaaugaau

SEQ ID NO: 813529 - RNA, 20 nt, Artificial Sequence
  Synthetic
uagugguuaggagaaugaau

SEQ ID NO: 813530 - RNA, 20 nt, Artificial Sequence
  Synthetic
auaaagacaaaugaaugaau

SEQ ID NO: 813531 - RNA, 20 nt, Artificial Sequence
  Synthetic
agugauacagauacaugaau

SEQ ID NO: 813532 - RNA, 20 nt, Artificial Sequence
  Synthetic
uaacaaaagcacccaugaau

SEQ ID NO: 813533 - RNA, 20 nt, Artificial Sequence
  Synthetic
aucauauccucuccaugaau

SEQ ID NO: 813534 - RNA, 20 nt, Artificial Sequence
  Synthetic
acaauggaaagcucaugaau

SEQ ID NO: 813535 - RNA, 20 nt, Artificial Sequence
  Synthetic
ugaauuuauacuucaugaau

SEQ ID NO: 813536 - RNA, 20 nt, Artificial Sequence
  Synthetic
cauauuccauguucaugaau

SEQ ID NO: 813537 - RNA, 20 nt, Artificial Sequence
  Synthetic
uuauaaaaagaaagaugaau

SEQ ID NO: 813538 - RNA, 20 nt, Artificial Sequence
  Synthetic
cauacuggagagggaugaau

SEQ ID NO: 813539 - RNA, 20 nt, Artificial Sequence
  Synthetic
aagaaagacaugggaugaau

SEQ ID NO: 813540 - RNA, 20 nt, Artificial Sequence
  Synthetic
acaaggauuucuggaugaau

SEQ ID NO: 813541 - RNA, 20 nt, Artificial Sequence
  Synthetic
uaccagguuugcugaugaau

SEQ ID NO: 813542 - RNA, 20 nt, Artificial Sequence
  Synthetic
cuguauacaaugugaugaau

SEQ ID NO: 813543 - RNA, 20 nt, Artificial Sequence
  Synthetic
ucuuaauccuuuugaugaau

SEQ ID NO: 813544 - RNA, 20 nt, Artificial Sequence
  Synthetic
ugaaaugaguuuugaugaau

SEQ ID NO: 813545 - RNA, 20 nt, Artificial Sequence
  Synthetic
uuuaagaaaaaaauaugaau

SEQ ID NO: 813546 - RNA, 20 nt, Artificial Sequence
  Synthetic
uaaaacuucaacauaugaau

SEQ ID NO: 813547 - RNA, 20 nt, Artificial Sequence
  Synthetic
ccagugucagcgcuaugaau

SEQ ID NO: 813548 - RNA, 20 nt, Artificial Sequence
  Synthetic
caaaaauggaggguaugaau

SEQ ID NO: 813549 - RNA, 20 nt, Artificial Sequence
  Synthetic
auugaguguuuuaacugaau

SEQ ID NO: 813550 - RNA, 20 nt, Artificial Sequence
  Synthetic
uuauuuugaauacacugaau

SEQ ID NO: 813551 - RNA, 20 nt, Artificial Sequence
  Synthetic
ucauugaaugaauacugaau

SEQ ID NO: 813552 - RNA, 20 nt, Artificial Sequence
  Synthetic
cagccaauaucauacugaau

SEQ ID NO: 813553 - RNA, 20 nt, Artificial Sequence
  Synthetic
cagccaguaucauacugaau

SEQ ID NO: 813554 - RNA, 20 nt, Artificial Sequence
  Synthetic
cagccauuaucauacugaau

SEQ ID NO: 813555 - RNA, 20 nt, Artificial Sequence
  Synthetic
cccagcaccauuuacugaau

SEQ ID NO: 813556 - RNA, 20 nt, Artificial Sequence
  Synthetic
aaccaccauugucccugaau

SEQ ID NO: 813557 - RNA, 20 nt, Artificial Sequence
  Synthetic
auuugcaggauuuccugaau

SEQ ID NO: 813558 - RNA, 20 nt, Artificial Sequence
  Synthetic
agcucuucacaaagcugaau

SEQ ID NO: 813559 - RNA, 20 nt, Artificial Sequence
  Synthetic
acagaugcguuuggcugaau

SEQ ID NO: 813560 - RNA, 20 nt, Artificial Sequence
  Synthetic
ccuucucuugcuugcugaau

SEQ ID NO: 813561 - RNA, 20 nt, Artificial Sequence
  Synthetic
agaaagaguaggaucugaau

SEQ ID NO: 813562 - RNA, 20 nt, Artificial Sequence
  Synthetic
aaauaaggucauaucugaau

SEQ ID NO: 813563 - RNA, 20 nt, Artificial Sequence
  Synthetic
cuguauagauuccucugaau

SEQ ID NO: 813564 - RNA, 20 nt, Artificial Sequence
  Synthetic
aacaaaaguugucucugaau

SEQ ID NO: 813565 - RNA, 20 nt, Artificial Sequence
  Synthetic
auuagacaaaugaagugaau

SEQ ID NO: 813566 - RNA, 20 nt, Artificial Sequence
  Synthetic
cuugucauacugaagugaau

SEQ ID NO: 813567 - RNA, 20 nt, Artificial Sequence
  Synthetic
cguagaaaaagacagugaau

SEQ ID NO: 813568 - RNA, 20 nt, Artificial Sequence
  Synthetic
cucacaaccucccagugaau

SEQ ID NO: 813569 - RNA, 20 nt, Artificial Sequence
  Synthetic
acuaaaaaucuccagugaau

SEQ ID NO: 813570 - RNA, 20 nt, Artificial Sequence
  Synthetic
uaguggugaaagcagugaau

SEQ ID NO: 813571 - RNA, 20 nt, Artificial Sequence
  Synthetic
cuauuacuaagugagugaau

SEQ ID NO: 813572 - RNA, 20 nt, Artificial Sequence
  Synthetic
caaaucuccagcaggugaau

SEQ ID NO: 813573 - RNA, 20 nt, Artificial Sequence
  Synthetic
aggcacacagaggggugaau

SEQ ID NO: 813574 - RNA, 20 nt, Artificial Sequence
  Synthetic
aaaauaaaaauugggugaau

SEQ ID NO: 813575 - RNA, 20 nt, Artificial Sequence
  Synthetic
auguuaaucuuugggugaau

SEQ ID NO: 813576 - RNA, 20 nt, Artificial Sequence
  Synthetic
auguaauuguacuggugaau

SEQ ID NO: 813577 - RNA, 20 nt, Artificial Sequence
  Synthetic
acagaaauuguguggugaau

SEQ ID NO: 813578 - RNA, 20 nt, Artificial Sequence
  Synthetic
aagacagaaaugcugugaau

SEQ ID NO: 813579 - RNA, 20 nt, Artificial Sequence
  Synthetic
uuuauuucuguucugugaau

SEQ ID NO: 813580 - RNA, 20 nt, Artificial Sequence
  Synthetic
ucuuugaagcaauugugaau

SEQ ID NO: 813581 - RNA, 20 nt, Artificial Sequence
  Synthetic
ucuuuguagcaauugugaau

SEQ ID NO: 813582 - RNA, 20 nt, Artificial Sequence
  Synthetic
cauauguaaauuuugugaau

SEQ ID NO: 813583 - RNA, 20 nt, Artificial Sequence
  Synthetic
uuuccuaauauuuugugaau

SEQ ID NO: 813584 - RNA, 20 nt, Artificial Sequence
  Synthetic
ccuauaacaagaaauugaau

SEQ ID NO: 813585 - RNA, 20 nt, Artificial Sequence
  Synthetic
aacuauauucguaauugaau

SEQ ID NO: 813586 - RNA, 20 nt, Artificial Sequence
  Synthetic
cuguaugcauuccauugaau

SEQ ID NO: 813587 - RNA, 20 nt, Artificial Sequence
  Synthetic
acuuuuacgucagauugaau

SEQ ID NO: 813588 - RNA, 20 nt, Artificial Sequence
  Synthetic
uaucaccagauauauugaau

SEQ ID NO: 813589 - RNA, 20 nt, Artificial Sequence
  Synthetic
uaagacauccccuauugaau

SEQ ID NO: 813590 - RNA, 20 nt, Artificial Sequence
  Synthetic
uuucaauagauguauugaau

SEQ ID NO: 813591 - RNA, 20 nt, Artificial Sequence
  Synthetic
uuauuaaaauagacuugaau

SEQ ID NO: 813592 - RNA, 20 nt, Artificial Sequence
  Synthetic
ugcagaguuauuacuugaau

SEQ ID NO: 813593 - RNA, 20 nt, Artificial Sequence
  Synthetic
agcuguuuuguuacuugaau

SEQ ID NO: 813594 - RNA, 20 nt, Artificial Sequence
  Synthetic
agaauauauuuuccuugaau

SEQ ID NO: 813595 - RNA, 20 nt, Artificial Sequence
  Synthetic
uagccaaggcaaucuugaau

SEQ ID NO: 813596 - RNA, 20 nt, Artificial Sequence
  Synthetic
agaacaacuccaucuugaau

SEQ ID NO: 813597 - RNA, 20 nt, Artificial Sequence
  Synthetic
auggacaggcuaaguugaau

SEQ ID NO: 813598 - RNA, 20 nt, Artificial Sequence
  Synthetic
cuacuguuguuaaguugaau

SEQ ID NO: 813599 - RNA, 20 nt, Artificial Sequence
  Synthetic
auaaaaacacaagguugaau

SEQ ID NO: 813600 - RNA, 20 nt, Artificial Sequence
  Synthetic
cuuccaacacuauguugaau

SEQ ID NO: 813601 - RNA, 20 nt, Artificial Sequence
  Synthetic
cuuccaauacuauguugaau

SEQ ID NO: 813602 - RNA, 20 nt, Artificial Sequence
  Synthetic
cauuuaaaaaacuguugaau

SEQ ID NO: 813603 - RNA, 20 nt, Artificial Sequence
  Synthetic
ccaauauugaauuguugaau

SEQ ID NO: 813604 - RNA, 20 nt, Artificial Sequence
  Synthetic
aauacucaugcuuguugaau

SEQ ID NO: 813605 - RNA, 20 nt, Artificial Sequence
  Synthetic
cagaaaacacgcauuugaau

SEQ ID NO: 813606 - RNA, 20 nt, Artificial Sequence
  Synthetic
uucuguaaaggcauuugaau

SEQ ID NO: 813607 - RNA, 20 nt, Artificial Sequence
  Synthetic
auaucaaaacauauuugaau

SEQ ID NO: 813608 - RNA, 20 nt, Artificial Sequence
  Synthetic
caguugauaaaaguuugaau

SEQ ID NO: 813609 - RNA, 20 nt, Artificial Sequence
  Synthetic
agugaagaaacaguuugaau

SEQ ID NO: 813610 - RNA, 20 nt, Artificial Sequence
  Synthetic
ugaccuugaaacuuuugaau

SEQ ID NO: 813611 - RNA, 20 nt, Artificial Sequence
  Synthetic
ugaacucugcacuuuugaau

SEQ ID NO: 813612 - RNA, 20 nt, Artificial Sequence
  Synthetic
ugacaucaacaguuuugaau

SEQ ID NO: 813613 - RNA, 20 nt, Artificial Sequence
  Synthetic
acaugugcauaguuuugaau

SEQ ID NO: 813614 - RNA, 20 nt, Artificial Sequence
  Synthetic
acguuuguagauuuuugaau

SEQ ID NO: 813615 - RNA, 20 nt, Artificial Sequence
  Synthetic
aauacuuuugaaaaaauaau

SEQ ID NO: 813616 - RNA, 20 nt, Artificial Sequence
  Synthetic
uaaucugcaugaaaaauaau

SEQ ID NO: 813617 - RNA, 20 nt, Artificial Sequence
  Synthetic
uaccuggguaacaaaauaau

SEQ ID NO: 813618 - RNA, 20 nt, Artificial Sequence
  Synthetic
auuugaauuaucaaaauaau

SEQ ID NO: 813619 - RNA, 20 nt, Artificial Sequence
  Synthetic
ugacggcuagugaaaauaau

SEQ ID NO: 813620 - RNA, 20 nt, Artificial Sequence
  Synthetic
aauuaguaaaauaaaauaau

SEQ ID NO: 813621 - RNA, 20 nt, Artificial Sequence
  Synthetic
aauaaguauauuaaaauaau

SEQ ID NO: 813622 - RNA, 20 nt, Artificial Sequence
  Synthetic
caaacaaacaaagaaauaau

SEQ ID NO: 813623 - RNA, 20 nt, Artificial Sequence
  Synthetic
caguaauguaaagaaauaau

SEQ ID NO: 813624 - RNA, 20 nt, Artificial Sequence
  Synthetic
auuauuauuuaagaaauaau

SEQ ID NO: 813625 - RNA, 20 nt, Artificial Sequence
  Synthetic
auaagcaagggagaaauaau

SEQ ID NO: 813626 - RNA, 20 nt, Artificial Sequence
  Synthetic
auuuuacaaaaggaaauaau

SEQ ID NO: 813627 - RNA, 20 nt, Artificial Sequence
  Synthetic
caaaugaaaauggaaauaau

SEQ ID NO: 813628 - RNA, 20 nt, Artificial Sequence
  Synthetic
ucaaaguaacuugaaauaau

SEQ ID NO: 813629 - RNA, 20 nt, Artificial Sequence
  Synthetic
aaguuucuagcuuaaauaau

SEQ ID NO: 813630 - RNA, 20 nt, Artificial Sequence
  Synthetic
agcaagggaaguuaaauaau

SEQ ID NO: 813631 - RNA, 20 nt, Artificial Sequence
  Synthetic
uauguauaauucacaauaau

SEQ ID NO: 813632 - RNA, 20 nt, Artificial Sequence
  Synthetic
uuggguauauaaccaauaau

SEQ ID NO: 813633 - RNA, 20 nt, Artificial Sequence
  Synthetic
cagucccaaugcccaauaau

SEQ ID NO: 813634 - RNA, 20 nt, Artificial Sequence
  Synthetic
cuggguauaugcccaauaau

SEQ ID NO: 813635 - RNA, 20 nt, Artificial Sequence
  Synthetic
uugcaugccuuuugaauaau

SEQ ID NO: 813636 - RNA, 20 nt, Artificial Sequence
  Synthetic
uaaagauuaaaaauaauaau

SEQ ID NO: 813637 - RNA, 20 nt, Artificial Sequence
  Synthetic
ugugucuuuaaaauaauaau

SEQ ID NO: 813638 - RNA, 20 nt, Artificial Sequence
  Synthetic
uuaaaaaaaauaauaauaau

SEQ ID NO: 813639 - RNA, 20 nt, Artificial Sequence
  Synthetic
aacccaagacacauaauaau

SEQ ID NO: 813640 - RNA, 20 nt, Artificial Sequence
  Synthetic
uaaauggcauuacuaauaau

SEQ ID NO: 813641 - RNA, 20 nt, Artificial Sequence
  Synthetic
ucauugguaugguuaauaau

SEQ ID NO: 813642 - RNA, 20 nt, Artificial Sequence
  Synthetic
aucuuacaaguguuaauaau

SEQ ID NO: 813643 - RNA, 20 nt, Artificial Sequence
  Synthetic
aaauucaacacuuuaauaau

SEQ ID NO: 813644 - RNA, 20 nt, Artificial Sequence
  Synthetic
agauucuuuuaaaacauaau

SEQ ID NO: 813645 - RNA, 20 nt, Artificial Sequence
  Synthetic
aacagugcuuggaacauaau

SEQ ID NO: 813646 - RNA, 20 nt, Artificial Sequence
  Synthetic
uggaaagagauacacauaau

SEQ ID NO: 813647 - RNA, 20 nt, Artificial Sequence
  Synthetic
uauaaaauugaccacauaau

SEQ ID NO: 813648 - RNA, 20 nt, Artificial Sequence
  Synthetic
ccacccaucauccacauaau

SEQ ID NO: 813649 - RNA, 20 nt, Artificial Sequence
  Synthetic
aguuacagcaugcacauaau

SEQ ID NO: 813650 - RNA, 20 nt, Artificial Sequence
  Synthetic
uuaaauuuacgagacauaau

SEQ ID NO: 813651 - RNA, 20 nt, Artificial Sequence
  Synthetic
auaagaaauucugacauaau

SEQ ID NO: 813652 - RNA, 20 nt, Artificial Sequence
  Synthetic
augauuguaugauacauaau

SEQ ID NO: 813653 - RNA, 20 nt, Artificial Sequence
  Synthetic
aaauuaucuuccuacauaau

SEQ ID NO: 813654 - RNA, 20 nt, Artificial Sequence
  Synthetic
uugggcuaauguagcauaau

SEQ ID NO: 813655 - RNA, 20 nt, Artificial Sequence
  Synthetic
cgcauuuucucacucauaau

SEQ ID NO: 813656 - RNA, 20 nt, Artificial Sequence
  Synthetic
aauauccauuaccucauaau

SEQ ID NO: 813657 - RNA, 20 nt, Artificial Sequence
  Synthetic
auguugagaggugucauaau

SEQ ID NO: 813658 - RNA, 20 nt, Artificial Sequence
  Synthetic
agaaauacauuugucauaau

SEQ ID NO: 813659 - RNA, 20 nt, Artificial Sequence
  Synthetic
aauauuuuauguuucauaau

SEQ ID NO: 813660 - RNA, 20 nt, Artificial Sequence
  Synthetic
auucagaauauaaagauaau

SEQ ID NO: 813661 - RNA, 20 nt, Artificial Sequence
  Synthetic
aagaaaacauucaagauaau

SEQ ID NO: 813662 - RNA, 20 nt, Artificial Sequence
  Synthetic
cucucccuuaagaagauaau

SEQ ID NO: 813663 - RNA, 20 nt, Artificial Sequence
  Synthetic
ccauauaaaaugaagauaau

SEQ ID NO: 813664 - RNA, 20 nt, Artificial Sequence
  Synthetic
aaugguguaaauaagauaau

SEQ ID NO: 813665 - RNA, 20 nt, Artificial Sequence
  Synthetic
auuguucugugacagauaau

SEQ ID NO: 813666 - RNA, 20 nt, Artificial Sequence
  Synthetic
uccaucugagauuagauaau

SEQ ID NO: 813667 - RNA, 20 nt, Artificial Sequence
  Synthetic
caucuaauaugaaggauaau

SEQ ID NO: 813668 - RNA, 20 nt, Artificial Sequence
  Synthetic
uccgaaguaccugggauaau

SEQ ID NO: 813669 - RNA, 20 nt, Artificial Sequence
  Synthetic
ugcauguucucacugauaau

SEQ ID NO: 813670 - RNA, 20 nt, Artificial Sequence
  Synthetic
auacccacaucauugauaau

SEQ ID NO: 813671 - RNA, 20 nt, Artificial Sequence
  Synthetic
uuuauuuguugguugauaau

SEQ ID NO: 813672 - RNA, 20 nt, Artificial Sequence
  Synthetic
uguuuugaguuuuugauaau

SEQ ID NO: 813673 - RNA, 20 nt, Artificial Sequence
  Synthetic
uuuuuucucuaaaauauaau

SEQ ID NO: 813674 - RNA, 20 nt, Artificial Sequence
  Synthetic
ucauuucccuagaauauaau

SEQ ID NO: 813675 - RNA, 20 nt, Artificial Sequence
  Synthetic
uucagaagagcuaauauaau

SEQ ID NO: 813676 - RNA, 20 nt, Artificial Sequence
  Synthetic
cuggaaccugcuaauauaau

SEQ ID NO: 813677 - RNA, 20 nt, Artificial Sequence
  Synthetic
uauauauauggacauauaau

SEQ ID NO: 813678 - RNA, 20 nt, Artificial Sequence
  Synthetic
aacauucccuggcauauaau

SEQ ID NO: 813679 - RNA, 20 nt, Artificial Sequence
  Synthetic
aagauaaggacugauauaau

SEQ ID NO: 813680 - RNA, 20 nt, Artificial Sequence
  Synthetic
uaaaguccugcugauauaau

SEQ ID NO: 813681 - RNA, 20 nt, Artificial Sequence
  Synthetic
aaacacaaaacauauauaau

SEQ ID NO: 813682 - RNA, 20 nt, Artificial Sequence
  Synthetic
aauuuccauucauauauaau

SEQ ID NO: 813683 - RNA, 20 nt, Artificial Sequence
  Synthetic
uucuagaucuuuuauauaau

SEQ ID NO: 813684 - RNA, 20 nt, Artificial Sequence
  Synthetic
caaggcaucuguacuauaau

SEQ ID NO: 813685 - RNA, 20 nt, Artificial Sequence
  Synthetic
cugaaaucucugccuauaau

SEQ ID NO: 813686 - RNA, 20 nt, Artificial Sequence
  Synthetic
auuaauuaaaagaguauaau

SEQ ID NO: 813687 - RNA, 20 nt, Artificial Sequence
  Synthetic
aaaauaaauaagaguauaau

SEQ ID NO: 813688 - RNA, 20 nt, Artificial Sequence
  Synthetic
cagcaaaacuuuaguauaau

SEQ ID NO: 813689 - RNA, 20 nt, Artificial Sequence
  Synthetic
acaucuccuagauguauaau

SEQ ID NO: 813690 - RNA, 20 nt, Artificial Sequence
  Synthetic
augugggccauauguauaau

SEQ ID NO: 813691 - RNA, 20 nt, Artificial Sequence
  Synthetic
cuuaaauuauaaauuauaau

SEQ ID NO: 813692 - RNA, 20 nt, Artificial Sequence
  Synthetic
uucuccuggacaauuauaau

SEQ ID NO: 813693 - RNA, 20 nt, Artificial Sequence
  Synthetic
auaugaaaugcaauuauaau

SEQ ID NO: 813694 - RNA, 20 nt, Artificial Sequence
  Synthetic
cuaucuagaaacauuauaau

SEQ ID NO: 813695 - RNA, 20 nt, Artificial Sequence
  Synthetic
ugaaauaguuucauuauaau

SEQ ID NO: 813696 - RNA, 20 nt, Artificial Sequence
  Synthetic
aauucagccaguauuauaau

SEQ ID NO: 813697 - RNA, 20 nt, Artificial Sequence
  Synthetic
aaagagugauuaguuauaau

SEQ ID NO: 813698 - RNA, 20 nt, Artificial Sequence
  Synthetic
cuuucaagugaguuuauaau

SEQ ID NO: 813699 - RNA, 20 nt, Artificial Sequence
  Synthetic
cagaagacaauuuuuauaau

SEQ ID NO: 813700 - RNA, 20 nt, Artificial Sequence
  Synthetic
uuugcauugguuuuuauaau

SEQ ID NO: 813701 - RNA, 20 nt, Artificial Sequence
  Synthetic
acauauuuauuaaaacuaau

SEQ ID NO: 813702 - RNA, 20 nt, Artificial Sequence
  Synthetic
aaccagaaaaaauaacuaau

SEQ ID NO: 813703 - RNA, 20 nt, Artificial Sequence
  Synthetic
uuugccuucauuuaacuaau

SEQ ID NO: 813704 - RNA, 20 nt, Artificial Sequence
  Synthetic
aauuuaaaaaaaucacuaau

SEQ ID NO: 813705 - RNA, 20 nt, Artificial Sequence
  Synthetic
auguguguauuuggacuaau

SEQ ID NO: 813706 - RNA, 20 nt, Artificial Sequence
  Synthetic
cccaaaacguaacuacuaau

SEQ ID NO: 813707 - RNA, 20 nt, Artificial Sequence
  Synthetic
cucauuuucuuacuacuaau

SEQ ID NO: 813708 - RNA, 20 nt, Artificial Sequence
  Synthetic
uauugcaauagccuacuaau

SEQ ID NO: 813709 - RNA, 20 nt, Artificial Sequence
  Synthetic
auuuuaaguauucuacuaau

SEQ ID NO: 813710 - RNA, 20 nt, Artificial Sequence
  Synthetic
agaaugaugcaauuacuaau

SEQ ID NO: 813711 - RNA, 20 nt, Artificial Sequence
  Synthetic
cugucacaacaguuacuaau

SEQ ID NO: 813712 - RNA, 20 nt, Artificial Sequence
  Synthetic
auuauuuaauaagaccuaau

SEQ ID NO: 813713 - RNA, 20 nt, Artificial Sequence
  Synthetic
ucaauuaauaaugaccuaau

SEQ ID NO: 813714 - RNA, 20 nt, Artificial Sequence
  Synthetic
uuuuaaaagcaauaccuaau

SEQ ID NO: 813715 - RNA, 20 nt, Artificial Sequence
  Synthetic
uuccuaacuuuguaccuaau

SEQ ID NO: 813716 - RNA, 20 nt, Artificial Sequence
  Synthetic
accacauauccuacccuaau

SEQ ID NO: 813717 - RNA, 20 nt, Artificial Sequence
  Synthetic
cauauauuggccucccuaau

SEQ ID NO: 813718 - RNA, 20 nt, Artificial Sequence
  Synthetic
augucuggcuaauuccuaau

SEQ ID NO: 813719 - RNA, 20 nt, Artificial Sequence
  Synthetic
cugagguugaaaaagcuaau

SEQ ID NO: 813720 - RNA, 20 nt, Artificial Sequence
  Synthetic
cuuguuaagguuaagcuaau

SEQ ID NO: 813721 - RNA, 20 nt, Artificial Sequence
  Synthetic
uguaagaauuugcagcuaau

SEQ ID NO: 813722 - RNA, 20 nt, Artificial Sequence
  Synthetic
uacauuuucagucagcuaau

SEQ ID NO: 813723 - RNA, 20 nt, Artificial Sequence
  Synthetic
augcuaaaugaugagcuaau

SEQ ID NO: 813724 - RNA, 20 nt, Artificial Sequence
  Synthetic
uuccacagugucuggcuaau

SEQ ID NO: 813725 - RNA, 20 nt, Artificial Sequence
  Synthetic
uugaagaaggcaaugcuaau

SEQ ID NO: 813726 - RNA, 20 nt, Artificial Sequence
  Synthetic
agugcguuugauaugcuaau

SEQ ID NO: 813727 - RNA, 20 nt, Artificial Sequence
  Synthetic
acauuagucauguugcuaau

SEQ ID NO: 813728 - RNA, 20 nt, Artificial Sequence
  Synthetic
auuucaguaauuuugcuaau

SEQ ID NO: 813729 - RNA, 20 nt, Artificial Sequence
  Synthetic
acugaagauguaaaucuaau

SEQ ID NO: 813730 - RNA, 20 nt, Artificial Sequence
  Synthetic
auuguaucuugacaucuaau

SEQ ID NO: 813731 - RNA, 20 nt, Artificial Sequence
  Synthetic
cucuuuuucugucaucuaau

SEQ ID NO: 813732 - RNA, 20 nt, Artificial Sequence
  Synthetic
ucaugcaaaaaugaucuaau

SEQ ID NO: 813733 - RNA, 20 nt, Artificial Sequence
  Synthetic
auauacacuggugaucuaau

SEQ ID NO: 813734 - RNA, 20 nt, Artificial Sequence
  Synthetic
agauuguuuccuccucuaau

SEQ ID NO: 813735 - RNA, 20 nt, Artificial Sequence
  Synthetic
cccagucuuacaagucuaau

SEQ ID NO: 813736 - RNA, 20 nt, Artificial Sequence
  Synthetic
uugcuauuuuucugucuaau

SEQ ID NO: 813737 - RNA, 20 nt, Artificial Sequence
  Synthetic
augcauguacuuugucuaau

SEQ ID NO: 813738 - RNA, 20 nt, Artificial Sequence
  Synthetic
caagacauguuuugucuaau

SEQ ID NO: 813739 - RNA, 20 nt, Artificial Sequence
  Synthetic
cuccauucuuccauucuaau

SEQ ID NO: 813740 - RNA, 20 nt, Artificial Sequence
  Synthetic
auuuuucagaucauucuaau

SEQ ID NO: 813741 - RNA, 20 nt, Artificial Sequence
  Synthetic
cugguauguuucauucuaau

SEQ ID NO: 813742 - RNA, 20 nt, Artificial Sequence
  Synthetic
aaccuguaacuucuucuaau

SEQ ID NO: 813743 - RNA, 20 nt, Artificial Sequence
  Synthetic
auuuuaauuagaaaaguaau

SEQ ID NO: 813744 - RNA, 20 nt, Artificial Sequence
  Synthetic
augcacaauagcaaaguaau

SEQ ID NO: 813745 - RNA, 20 nt, Artificial Sequence
  Synthetic
uuuaaacaguagaaaguaau

SEQ ID NO: 813746 - RNA, 20 nt, Artificial Sequence
  Synthetic
acuccccugaauaaaguaau

SEQ ID NO: 813747 - RNA, 20 nt, Artificial Sequence
  Synthetic
ucugucacugugcaaguaau

SEQ ID NO: 813748 - RNA, 20 nt, Artificial Sequence
  Synthetic
cauguuaaacuucaaguaau

SEQ ID NO: 813749 - RNA, 20 nt, Artificial Sequence
  Synthetic
aaucuuacacuucaaguaau

SEQ ID NO: 813750 - RNA, 20 nt, Artificial Sequence
  Synthetic
aucuuaugaaaauaaguaau

SEQ ID NO: 813751 - RNA, 20 nt, Artificial Sequence
  Synthetic
agacccucacucuaaguaau

SEQ ID NO: 813752 - RNA, 20 nt, Artificial Sequence
  Synthetic
cagcacaacacguaaguaau

SEQ ID NO: 813753 - RNA, 20 nt, Artificial Sequence
  Synthetic
uuggguauauaaccaguaau

SEQ ID NO: 813754 - RNA, 20 nt, Artificial Sequence
  Synthetic
uuggguauauacccaguaau

SEQ ID NO: 813755 - RNA, 20 nt, Artificial Sequence
  Synthetic
ugggcuauaugcccaguaau

SEQ ID NO: 813756 - RNA, 20 nt, Artificial Sequence
  Synthetic
uuggguauauauccaguaau

SEQ ID NO: 813757 - RNA, 20 nt, Artificial Sequence
  Synthetic
aagccaaaccaugcaguaau

SEQ ID NO: 813758 - RNA, 20 nt, Artificial Sequence
  Synthetic
uuggguauauaugcaguaau

SEQ ID NO: 813759 - RNA, 20 nt, Artificial Sequence
  Synthetic
ucucuaggaggaucaguaau

SEQ ID NO: 813760 - RNA, 20 nt, Artificial Sequence
  Synthetic
uuggauauauacucaguaau

SEQ ID NO: 813761 - RNA, 20 nt, Artificial Sequence
  Synthetic
uuggauaucuacucaguaau

SEQ ID NO: 813762 - RNA, 20 nt, Artificial Sequence
  Synthetic
cauagugccuagucaguaau

SEQ ID NO: 813763 - RNA, 20 nt, Artificial Sequence
  Synthetic
caaacuaaauauucaguaau

SEQ ID NO: 813764 - RNA, 20 nt, Artificial Sequence
  Synthetic
cugagucaauguagaguaau

SEQ ID NO: 813765 - RNA, 20 nt, Artificial Sequence
  Synthetic
auauuaagaaguggaguaau

SEQ ID NO: 813766 - RNA, 20 nt, Artificial Sequence
  Synthetic
acauuugaguagauaguaau

SEQ ID NO: 813767 - RNA, 20 nt, Artificial Sequence
  Synthetic
caaggagcucauauaguaau

SEQ ID NO: 813768 - RNA, 20 nt, Artificial Sequence
  Synthetic
agacauccuuauuuaguaau

SEQ ID NO: 813769 - RNA, 20 nt, Artificial Sequence
  Synthetic
uuccuaaguaguuucguaau

SEQ ID NO: 813770 - RNA, 20 nt, Artificial Sequence
  Synthetic
cucauucauucccagguaau

SEQ ID NO: 813771 - RNA, 20 nt, Artificial Sequence
  Synthetic
cugugacaucacuagguaau

SEQ ID NO: 813772 - RNA, 20 nt, Artificial Sequence
  Synthetic
acuuguauuaauuagguaau

SEQ ID NO: 813773 - RNA, 20 nt, Artificial Sequence
  Synthetic
cuggcuuguauggggguaau

SEQ ID NO: 813774 - RNA, 20 nt, Artificial Sequence
  Synthetic
caacuuuagaacuggguaau

SEQ ID NO: 813775 - RNA, 20 nt, Artificial Sequence
  Synthetic
cauugauccuauuggguaau

SEQ ID NO: 813776 - RNA, 20 nt, Artificial Sequence
  Synthetic
cuuuuaauuucugugguaau

SEQ ID NO: 813777 - RNA, 20 nt, Artificial Sequence
  Synthetic
uaaacacauauugugguaau

SEQ ID NO: 813778 - RNA, 20 nt, Artificial Sequence
  Synthetic
uauagugagagauugguaau

SEQ ID NO: 813779 - RNA, 20 nt, Artificial Sequence
  Synthetic
acaggguggacaaauguaau

SEQ ID NO: 813780 - RNA, 20 nt, Artificial Sequence
  Synthetic
uacuuuguacuaaauguaau

SEQ ID NO: 813781 - RNA, 20 nt, Artificial Sequence
  Synthetic
uucaaauuucuaaauguaau

SEQ ID NO: 813782 - RNA, 20 nt, Artificial Sequence
  Synthetic
aacagagaaauuaauguaau

SEQ ID NO: 813783 - RNA, 20 nt, Artificial Sequence
  Synthetic
ucuaccaacacacauguaau

SEQ ID NO: 813784 - RNA, 20 nt, Artificial Sequence
  Synthetic
uaguaaaacuuccauguaau

SEQ ID NO: 813785 - RNA, 20 nt, Artificial Sequence
  Synthetic
cauuuccaucauucuguaau

SEQ ID NO: 813786 - RNA, 20 nt, Artificial Sequence
  Synthetic
ugcauuuuuucuucuguaau

SEQ ID NO: 813787 - RNA, 20 nt, Artificial Sequence
  Synthetic
cugacagaaaacaguguaau

SEQ ID NO: 813788 - RNA, 20 nt, Artificial Sequence
  Synthetic
uuaauauuuuucaguguaau

SEQ ID NO: 813789 - RNA, 20 nt, Artificial Sequence
  Synthetic
uaauagagagugaguguaau

SEQ ID NO: 813790 - RNA, 20 nt, Artificial Sequence
  Synthetic
aaacaagugguggguguaau

SEQ ID NO: 813791 - RNA, 20 nt, Artificial Sequence
  Synthetic
ugaucacuuaccuguguaau

SEQ ID NO: 813792 - RNA, 20 nt, Artificial Sequence
  Synthetic
aggggaaaaauguguguaau

SEQ ID NO: 813793 - RNA, 20 nt, Artificial Sequence
  Synthetic
uaaccuuccaaaauuguaau

SEQ ID NO: 813794 - RNA, 20 nt, Artificial Sequence
  Synthetic
uacagcagaguaauuguaau

SEQ ID NO: 813795 - RNA, 20 nt, Artificial Sequence
  Synthetic
uauucuaccuuccuuguaau

SEQ ID NO: 813796 - RNA, 20 nt, Artificial Sequence
  Synthetic
ccacaucuguggcuuguaau

SEQ ID NO: 813797 - RNA, 20 nt, Artificial Sequence
  Synthetic
ugagaaaaguaaguuguaau

SEQ ID NO: 813798 - RNA, 20 nt, Artificial Sequence
  Synthetic
augaaugcuucauuuguaau

SEQ ID NO: 813799 - RNA, 20 nt, Artificial Sequence
  Synthetic
ucaaugugauuauuuguaau

SEQ ID NO: 813800 - RNA, 20 nt, Artificial Sequence
  Synthetic
uucuuuuuaugaaaauuaau

SEQ ID NO: 813801 - RNA, 20 nt, Artificial Sequence
  Synthetic
ucauccauucauaaauuaau

SEQ ID NO: 813802 - RNA, 20 nt, Artificial Sequence
  Synthetic
uuccuuguugcuaaauuaau

SEQ ID NO: 813803 - RNA, 20 nt, Artificial Sequence
  Synthetic
ucaacuuaguagcaauuaau

SEQ ID NO: 813804 - RNA, 20 nt, Artificial Sequence
  Synthetic
aaguaaaauaaugaauuaau

SEQ ID NO: 813805 - RNA, 20 nt, Artificial Sequence
  Synthetic
uauaaacguauauaauuaau

SEQ ID NO: 813806 - RNA, 20 nt, Artificial Sequence
  Synthetic
ugaauuuucuguuaauuaau

SEQ ID NO: 813807 - RNA, 20 nt, Artificial Sequence
  Synthetic
uguaucauguuuuaauuaau

SEQ ID NO: 813808 - RNA, 20 nt, Artificial Sequence
  Synthetic
auguauauacaaacauuaau

SEQ ID NO: 813809 - RNA, 20 nt, Artificial Sequence
  Synthetic
auugguuuaacaacauuaau

SEQ ID NO: 813810 - RNA, 20 nt, Artificial Sequence
  Synthetic
aauaggcuguuaacauuaau

SEQ ID NO: 813811 - RNA, 20 nt, Artificial Sequence
  Synthetic
uugugacuauggacauuaau

SEQ ID NO: 813812 - RNA, 20 nt, Artificial Sequence
  Synthetic
aaucuaaagcugacauuaau

SEQ ID NO: 813813 - RNA, 20 nt, Artificial Sequence
  Synthetic
aaaaaacugaauacauuaau

SEQ ID NO: 813814 - RNA, 20 nt, Artificial Sequence
  Synthetic
uuauccuguccaccauuaau

SEQ ID NO: 813815 - RNA, 20 nt, Artificial Sequence
  Synthetic
auuugucucgcuccauuaau

SEQ ID NO: 813816 - RNA, 20 nt, Artificial Sequence
  Synthetic
aauuuguuaagaucauuaau

SEQ ID NO: 813817 - RNA, 20 nt, Artificial Sequence
  Synthetic
uagcuauaaaguucauuaau

SEQ ID NO: 813818 - RNA, 20 nt, Artificial Sequence
  Synthetic
caaaaaaaauguucauuaau

SEQ ID NO: 813819 - RNA, 20 nt, Artificial Sequence
  Synthetic
aaauagccaucaugauuaau

SEQ ID NO: 813820 - RNA, 20 nt, Artificial Sequence
  Synthetic
uacacuccugacugauuaau

SEQ ID NO: 813821 - RNA, 20 nt, Artificial Sequence
  Synthetic
aacaaaacuuagugauuaau

SEQ ID NO: 813822 - RNA, 20 nt, Artificial Sequence
  Synthetic
aagaaguuauuaauauuaau

SEQ ID NO: 813823 - RNA, 20 nt, Artificial Sequence
  Synthetic
uacagacaacucauauuaau

SEQ ID NO: 813824 - RNA, 20 nt, Artificial Sequence
  Synthetic
aaauagauauaauuauuaau

SEQ ID NO: 813825 - RNA, 20 nt, Artificial Sequence
  Synthetic
uagguaguagcauuauuaau

SEQ ID NO: 813826 - RNA, 20 nt, Artificial Sequence
  Synthetic
uauuuagcuguugacuuaau

SEQ ID NO: 813827 - RNA, 20 nt, Artificial Sequence
  Synthetic
cacaaggacaucuacuuaau

SEQ ID NO: 813828 - RNA, 20 nt, Artificial Sequence
  Synthetic
agagugagaaauuacuuaau

SEQ ID NO: 813829 - RNA, 20 nt, Artificial Sequence
  Synthetic
aguuaaaucagagccuuaau

SEQ ID NO: 813830 - RNA, 20 nt, Artificial Sequence
  Synthetic
agaaacucuucuuccuuaau

SEQ ID NO: 813831 - RNA, 20 nt, Artificial Sequence
  Synthetic
aaugaauuuuacagcuuaau

SEQ ID NO: 813832 - RNA, 20 nt, Artificial Sequence
  Synthetic
uguagucaacaaggcuuaau

SEQ ID NO: 813833 - RNA, 20 nt, Artificial Sequence
  Synthetic
aacagacuauggcucuuaau

SEQ ID NO: 813834 - RNA, 20 nt, Artificial Sequence
  Synthetic
ccauagguugccuucuuaau

SEQ ID NO: 813835 - RNA, 20 nt, Artificial Sequence
  Synthetic
cuaccaauuauguucuuaau

SEQ ID NO: 813836 - RNA, 20 nt, Artificial Sequence
  Synthetic
uucuuaauuaauuucuuaau

SEQ ID NO: 813837 - RNA, 20 nt, Artificial Sequence
  Synthetic
uaaucaauggcaaaguuaau

SEQ ID NO: 813838 - RNA, 20 nt, Artificial Sequence
  Synthetic
aauguaaaugacaaguuaau

SEQ ID NO: 813839 - RNA, 20 nt, Artificial Sequence
  Synthetic
uuacuuuuaaggaaguuaau

SEQ ID NO: 813840 - RNA, 20 nt, Artificial Sequence
  Synthetic
auauuuucagugaaguuaau

SEQ ID NO: 813841 - RNA, 20 nt, Artificial Sequence
  Synthetic
augcuaaaugaccaguuaau

SEQ ID NO: 813842 - RNA, 20 nt, Artificial Sequence
  Synthetic
auguuaaaugaagaguuaau

SEQ ID NO: 813843 - RNA, 20 nt, Artificial Sequence
  Synthetic
ucaaacucuccagaguuaau

SEQ ID NO: 813844 - RNA, 20 nt, Artificial Sequence
  Synthetic
augcuaaaugacgaguuaau

SEQ ID NO: 813845 - RNA, 20 nt, Artificial Sequence
  Synthetic
augguaaaugacgaguuaau

SEQ ID NO: 813846 - RNA, 20 nt, Artificial Sequence
  Synthetic
aauguaaaugacgaguuaau

SEQ ID NO: 813847 - RNA, 20 nt, Artificial Sequence
  Synthetic
auguucaaugacgaguuaau

SEQ ID NO: 813848 - RNA, 20 nt, Artificial Sequence
  Synthetic
caccccccaucuacguuaau

SEQ ID NO: 813849 - RNA, 20 nt, Artificial Sequence
  Synthetic
ucauaaauuaauagguuaau

SEQ ID NO: 813850 - RNA, 20 nt, Artificial Sequence
  Synthetic
ucucuaggugauggguuaau

SEQ ID NO: 813851 - RNA, 20 nt, Artificial Sequence
  Synthetic
augcuuacuaccugguuaau

SEQ ID NO: 813852 - RNA, 20 nt, Artificial Sequence
  Synthetic
augaaaauauuuugguuaau

SEQ ID NO: 813853 - RNA, 20 nt, Artificial Sequence
  Synthetic
uaacaagaagaaauguuaau

SEQ ID NO: 813854 - RNA, 20 nt, Artificial Sequence
  Synthetic
acaaggagcccaauguuaau

SEQ ID NO: 813855 - RNA, 20 nt, Artificial Sequence
  Synthetic
auuuuaugguuuauguuaau

SEQ ID NO: 813856 - RNA, 20 nt, Artificial Sequence
  Synthetic
aauagaaagggacuguuaau

SEQ ID NO: 813857 - RNA, 20 nt, Artificial Sequence
  Synthetic
aacaauggauauuuguuaau

SEQ ID NO: 813858 - RNA, 20 nt, Artificial Sequence
  Synthetic
cucuagucugaaaauuuaau

SEQ ID NO: 813859 - RNA, 20 nt, Artificial Sequence
  Synthetic
uuucagaauacaaauuuaau

SEQ ID NO: 813860 - RNA, 20 nt, Artificial Sequence
  Synthetic
uuauuaucuauaaauuuaau

SEQ ID NO: 813861 - RNA, 20 nt, Artificial Sequence
  Synthetic
uuauuuuuuguuaauuuaau

SEQ ID NO: 813862 - RNA, 20 nt, Artificial Sequence
  Synthetic
aacaaaauuaaacauuuaau

SEQ ID NO: 813863 - RNA, 20 nt, Artificial Sequence
  Synthetic
aguuaugaaauccauuuaau

SEQ ID NO: 813864 - RNA, 20 nt, Artificial Sequence
  Synthetic
uacacuccuauccauuuaau

SEQ ID NO: 813865 - RNA, 20 nt, Artificial Sequence
  Synthetic
aagacucauaugcauuuaau

SEQ ID NO: 813866 - RNA, 20 nt, Artificial Sequence
  Synthetic
uaucaacuuaucuauuuaau

SEQ ID NO: 813867 - RNA, 20 nt, Artificial Sequence
  Synthetic
uacacuuuucaguauuuaau

SEQ ID NO: 813868 - RNA, 20 nt, Artificial Sequence
  Synthetic
uucuugauaauguauuuaau

SEQ ID NO: 813869 - RNA, 20 nt, Artificial Sequence
  Synthetic
uuaacuuuagguuauuuaau

SEQ ID NO: 813870 - RNA, 20 nt, Artificial Sequence
  Synthetic
uaggcuagagaaucuuuaau

SEQ ID NO: 813871 - RNA, 20 nt, Artificial Sequence
  Synthetic
uguuaguuuuaaucuuuaau

SEQ ID NO: 813872 - RNA, 20 nt, Artificial Sequence
  Synthetic
uugaaucuacugucuuuaau

SEQ ID NO: 813873 - RNA, 20 nt, Artificial Sequence
  Synthetic
uaauuucuugugucuuuaau

SEQ ID NO: 813874 - RNA, 20 nt, Artificial Sequence
  Synthetic
aacaagaaaaaaaguuuaau

SEQ ID NO: 813875 - RNA, 20 nt, Artificial Sequence
  Synthetic
ccuacauaucaaaguuuaau

SEQ ID NO: 813876 - RNA, 20 nt, Artificial Sequence
  Synthetic
caaagagguacaaguuuaau

SEQ ID NO: 813877 - RNA, 20 nt, Artificial Sequence
  Synthetic
auaaaguaaagagguuuaau

SEQ ID NO: 813878 - RNA, 20 nt, Artificial Sequence
  Synthetic
agacaaaauagauguuuaau

SEQ ID NO: 813879 - RNA, 20 nt, Artificial Sequence
  Synthetic
ugaacaguacauuguuuaau

SEQ ID NO: 813880 - RNA, 20 nt, Artificial Sequence
  Synthetic
ugaagucaaacaauuuuaau

SEQ ID NO: 813881 - RNA, 20 nt, Artificial Sequence
  Synthetic
ucaacuauugacauuuuaau

SEQ ID NO: 813882 - RNA, 20 nt, Artificial Sequence
  Synthetic
aaugucucucucauuuuaau

SEQ ID NO: 813883 - RNA, 20 nt, Artificial Sequence
  Synthetic
aaggugaacaauauuuuaau

SEQ ID NO: 813884 - RNA, 20 nt, Artificial Sequence
  Synthetic
cuacuauuuaauauuuuaau

SEQ ID NO: 813885 - RNA, 20 nt, Artificial Sequence
  Synthetic
uuuagcauuucuauuuuaau

SEQ ID NO: 813886 - RNA, 20 nt, Artificial Sequence
  Synthetic
caguagcaauuuauuuuaau

SEQ ID NO: 813887 - RNA, 20 nt, Artificial Sequence
  Synthetic
ucaguaaauuuuauuuuaau

SEQ ID NO: 813888 - RNA, 20 nt, Artificial Sequence
  Synthetic
uuaccaaaaaaacuuuuaau

SEQ ID NO: 813889 - RNA, 20 nt, Artificial Sequence
  Synthetic
ucagcuaaaucucuuuuaau

SEQ ID NO: 813890 - RNA, 20 nt, Artificial Sequence
  Synthetic
uaaaguugggaaguuuuaau

SEQ ID NO: 813891 - RNA, 20 nt, Artificial Sequence
  Synthetic
uuuggauaugucguuuuaau

SEQ ID NO: 813892 - RNA, 20 nt, Artificial Sequence
  Synthetic
ucuuuguagcaauuuuuaau

SEQ ID NO: 813893 - RNA, 20 nt, Artificial Sequence
  Synthetic
uuuuuuuguucauuuuuaau

SEQ ID NO: 813894 - RNA, 20 nt, Artificial Sequence
  Synthetic
aauuagaauggauuuuuaau

SEQ ID NO: 813895 - RNA, 20 nt, Artificial Sequence
  Synthetic
agacaacuauuauuuuuaau

SEQ ID NO: 813896 - RNA, 20 nt, Artificial Sequence
  Synthetic
aaauuucagauuuuuuuaau

SEQ ID NO: 813897 - RNA, 20 nt, Artificial Sequence
  Synthetic
uuuuuuuuuuuuuuuuuaau

SEQ ID NO: 813898 - RNA, 20 nt, Artificial Sequence
  Synthetic
auuuugcagaaaaaaaacau

SEQ ID NO: 813899 - RNA, 20 nt, Artificial Sequence
  Synthetic
aucuuuucaauaaaaaacau

SEQ ID NO: 813900 - RNA, 20 nt, Artificial Sequence
  Synthetic
uaguaaacaugcaaaaacau

SEQ ID NO: 813901 - RNA, 20 nt, Artificial Sequence
  Synthetic
aaaaauucauaagaaaacau

SEQ ID NO: 813902 - RNA, 20 nt, Artificial Sequence
  Synthetic
accauuaaaaaauaaaacau

SEQ ID NO: 813903 - RNA, 20 nt, Artificial Sequence
  Synthetic
ucauuaaagaaauaaaacau

SEQ ID NO: 813904 - RNA, 20 nt, Artificial Sequence
  Synthetic
cuguuuugguaauaaaacau

SEQ ID NO: 813905 - RNA, 20 nt, Artificial Sequence
  Synthetic
augaccacagcauaaaacau

SEQ ID NO: 813906 - RNA, 20 nt, Artificial Sequence
  Synthetic
ccaaauaccuaguaaaacau

SEQ ID NO: 813907 - RNA, 20 nt, Artificial Sequence
  Synthetic
aaaaauaaguuuuaaaacau

SEQ ID NO: 813908 - RNA, 20 nt, Artificial Sequence
  Synthetic
uauuucaggucaacaaacau

SEQ ID NO: 813909 - RNA, 20 nt, Artificial Sequence
  Synthetic
aggugaaaaagaacaaacau

SEQ ID NO: 813910 - RNA, 20 nt, Artificial Sequence
  Synthetic
auauccauuaucucaaacau

SEQ ID NO: 813911 - RNA, 20 nt, Artificial Sequence
  Synthetic
uguguuuuacaaagaaacau

SEQ ID NO: 813912 - RNA, 20 nt, Artificial Sequence
  Synthetic
accugcuugaucagaaacau

SEQ ID NO: 813913 - RNA, 20 nt, Artificial Sequence
  Synthetic
aaacuacuacaaggaaacau

SEQ ID NO: 813914 - RNA, 20 nt, Artificial Sequence
  Synthetic
uuuuaccacucuggaaacau

SEQ ID NO: 813915 - RNA, 20 nt, Artificial Sequence
  Synthetic
aaaaaugcuacaauaaacau

SEQ ID NO: 813916 - RNA, 20 nt, Artificial Sequence
  Synthetic
aauagagcugcaauaaacau

SEQ ID NO: 813917 - RNA, 20 nt, Artificial Sequence
  Synthetic
aauagcgcugcaauaaacau

SEQ ID NO: 813918 - RNA, 20 nt, Artificial Sequence
  Synthetic
aauaaugcugcaauaaacau

SEQ ID NO: 813919 - RNA, 20 nt, Artificial Sequence
  Synthetic
augcuaguugagauaaacau

SEQ ID NO: 813920 - RNA, 20 nt, Artificial Sequence
  Synthetic
ugguaauguuuuauaaacau

SEQ ID NO: 813921 - RNA, 20 nt, Artificial Sequence
  Synthetic
uuauaagugggccuaaacau

SEQ ID NO: 813922 - RNA, 20 nt, Artificial Sequence
  Synthetic
aaaagugcugcaguaaacau

SEQ ID NO: 813923 - RNA, 20 nt, Artificial Sequence
  Synthetic
ccuugaaaaaagaacaacau

SEQ ID NO: 813924 - RNA, 20 nt, Artificial Sequence
  Synthetic
aaagguuuugaacacaacau

SEQ ID NO: 813925 - RNA, 20 nt, Artificial Sequence
  Synthetic
caguccuuuauccacaacau

SEQ ID NO: 813926 - RNA, 20 nt, Artificial Sequence
  Synthetic
uauaucuuuugugacaacau

SEQ ID NO: 813927 - RNA, 20 nt, Artificial Sequence
  Synthetic
ccuuuccuaugcuacaacau

SEQ ID NO: 813928 - RNA, 20 nt, Artificial Sequence
  Synthetic
ccaggccccaccaccaacau

SEQ ID NO: 813929 - RNA, 20 nt, Artificial Sequence
  Synthetic
aauauauaugcacccaacau

SEQ ID NO: 813930 - RNA, 20 nt, Artificial Sequence
  Synthetic
uggggaauugaggccaacau

SEQ ID NO: 813931 - RNA, 20 nt, Artificial Sequence
  Synthetic
ccaggccccaccuccaacau

SEQ ID NO: 813932 - RNA, 20 nt, Artificial Sequence
  Synthetic
ccaggcccugccuccaacau

SEQ ID NO: 813933 - RNA, 20 nt, Artificial Sequence
  Synthetic
cuccuccauguaagcaacau

SEQ ID NO: 813934 - RNA, 20 nt, Artificial Sequence
  Synthetic
uguuacaagaaaggcaacau

SEQ ID NO: 813935 - RNA, 20 nt, Artificial Sequence
  Synthetic
uguaagacugaaaucaacau

SEQ ID NO: 813936 - RNA, 20 nt, Artificial Sequence
  Synthetic
uaaaugauagcaaucaacau

SEQ ID NO: 813937 - RNA, 20 nt, Artificial Sequence
  Synthetic
caaaguaaugggaucaacau

SEQ ID NO: 813938 - RNA, 20 nt, Artificial Sequence
  Synthetic
ccucuuuugucccucaacau

SEQ ID NO: 813939 - RNA, 20 nt, Artificial Sequence
  Synthetic
cuucacauacuugucaacau

SEQ ID NO: 813940 - RNA, 20 nt, Artificial Sequence
  Synthetic
auuuuuuaggauuucaacau

SEQ ID NO: 813941 - RNA, 20 nt, Artificial Sequence
  Synthetic
aacaaccccacuuucaacau

SEQ ID NO: 813942 - RNA, 20 nt, Artificial Sequence
  Synthetic
augaaaugaccuuucaacau

SEQ ID NO: 813943 - RNA, 20 nt, Artificial Sequence
  Synthetic
agaacaaauggaaagaacau

SEQ ID NO: 813944 - RNA, 20 nt, Artificial Sequence
  Synthetic
aauaacccaaaagagaacau

SEQ ID NO: 813945 - RNA, 20 nt, Artificial Sequence
  Synthetic
acaaaguaaaccgagaacau

SEQ ID NO: 813946 - RNA, 20 nt, Artificial Sequence
  Synthetic
ccacuuauaaaugagaacau

SEQ ID NO: 813947 - RNA, 20 nt, Artificial Sequence
  Synthetic
ucacuuauaagugagaacau

SEQ ID NO: 813948 - RNA, 20 nt, Artificial Sequence
  Synthetic
uuguguggggaaaggaacau

SEQ ID NO: 813949 - RNA, 20 nt, Artificial Sequence
  Synthetic
agaaguauauaaaggaacau

SEQ ID NO: 813950 - RNA, 20 nt, Artificial Sequence
  Synthetic
aaauaaggaaaacggaacau

SEQ ID NO: 813951 - RNA, 20 nt, Artificial Sequence
  Synthetic
auaggacagaaauggaacau

SEQ ID NO: 813952 - RNA, 20 nt, Artificial Sequence
  Synthetic
ugcaauaguuugaugaacau

SEQ ID NO: 813953 - RNA, 20 nt, Artificial Sequence
  Synthetic
uucuaauagaguaugaacau

SEQ ID NO: 813954 - RNA, 20 nt, Artificial Sequence
  Synthetic
auuacagaaguuaugaacau

SEQ ID NO: 813955 - RNA, 20 nt, Artificial Sequence
  Synthetic
augaucaauagauugaacau

SEQ ID NO: 813956 - RNA, 20 nt, Artificial Sequence
  Synthetic
cacacgaaaagcuugaacau

SEQ ID NO: 813957 - RNA, 20 nt, Artificial Sequence
  Synthetic
uauccuaggugaaauaacau

SEQ ID NO: 813958 - RNA, 20 nt, Artificial Sequence
  Synthetic
uacaucauuuuucauaacau

SEQ ID NO: 813959 - RNA, 20 nt, Artificial Sequence
  Synthetic
acaccaauaaaugauaacau

SEQ ID NO: 813960 - RNA, 20 nt, Artificial Sequence
  Synthetic
uucagcuuuuauuauaacau

SEQ ID NO: 813961 - RNA, 20 nt, Artificial Sequence
  Synthetic
uacauuuucuugaguaacau

SEQ ID NO: 813962 - RNA, 20 nt, Artificial Sequence
  Synthetic
ugaauauuaauuaguaacau

SEQ ID NO: 813963 - RNA, 20 nt, Artificial Sequence
  Synthetic
ugauuagcaagggguaacau

SEQ ID NO: 813964 - RNA, 20 nt, Artificial Sequence
  Synthetic
uuagagugaugauguaacau

SEQ ID NO: 813965 - RNA, 20 nt, Artificial Sequence
  Synthetic
ucuagagugcuuuguaacau

SEQ ID NO: 813966 - RNA, 20 nt, Artificial Sequence
  Synthetic
agugggcaccauauuaacau

SEQ ID NO: 813967 - RNA, 20 nt, Artificial Sequence
  Synthetic
uucuguauauauauuaacau

SEQ ID NO: 813968 - RNA, 20 nt, Artificial Sequence
  Synthetic
auugucuugccuauuaacau

SEQ ID NO: 813969 - RNA, 20 nt, Artificial Sequence
  Synthetic
uuaaaggggauucuuaacau

SEQ ID NO: 813970 - RNA, 20 nt, Artificial Sequence
  Synthetic
agaugugagcaguuuaacau

SEQ ID NO: 813971 - RNA, 20 nt, Artificial Sequence
  Synthetic
cuucucaagggaacacacau

SEQ ID NO: 813972 - RNA, 20 nt, Artificial Sequence
  Synthetic
ucacaugcaaacacacacau

SEQ ID NO: 813973 - RNA, 20 nt, Artificial Sequence
  Synthetic
caccauauacccacacacau

SEQ ID NO: 813974 - RNA, 20 nt, Artificial Sequence
  Synthetic
ucacgugcagagacacacau

SEQ ID NO: 813975 - RNA, 20 nt, Artificial Sequence
  Synthetic
ucaugugcagagacacacau

SEQ ID NO: 813976 - RNA, 20 nt, Artificial Sequence
  Synthetic
augaucccacuaucacacau

SEQ ID NO: 813977 - RNA, 20 nt, Artificial Sequence
  Synthetic
uauuugugguugucacacau

SEQ ID NO: 813978 - RNA, 20 nt, Artificial Sequence
  Synthetic
uuugaaaaaccuagacacau

SEQ ID NO: 813979 - RNA, 20 nt, Artificial Sequence
  Synthetic
auaaucuaugguagacacau

SEQ ID NO: 813980 - RNA, 20 nt, Artificial Sequence
  Synthetic
aggucacucccaugacacau

SEQ ID NO: 813981 - RNA, 20 nt, Artificial Sequence
  Synthetic
uuucucucaauuugacacau

SEQ ID NO: 813982 - RNA, 20 nt, Artificial Sequence
  Synthetic
ugaauauuuuauauacacau

SEQ ID NO: 813983 - RNA, 20 nt, Artificial Sequence
  Synthetic
ugggaagaaagccuacacau

SEQ ID NO: 813984 - RNA, 20 nt, Artificial Sequence
  Synthetic
cuauauugcuccuuacacau

SEQ ID NO: 813985 - RNA, 20 nt, Artificial Sequence
  Synthetic
aggccagaaauuaaccacau

SEQ ID NO: 813986 - RNA, 20 nt, Artificial Sequence
  Synthetic
acagaagcuguagaccacau

SEQ ID NO: 813987 - RNA, 20 nt, Artificial Sequence
  Synthetic
agugaucauagugaccacau

SEQ ID NO: 813988 - RNA, 20 nt, Artificial Sequence
  Synthetic
accaaaagaaaagcccacau

SEQ ID NO: 813989 - RNA, 20 nt, Artificial Sequence
  Synthetic
cucaagugauccgcccacau

SEQ ID NO: 813990 - RNA, 20 nt, Artificial Sequence
  Synthetic
auccacagcaucgcccacau

SEQ ID NO: 813991 - RNA, 20 nt, Artificial Sequence
  Synthetic
ugacuacuuucaugccacau

SEQ ID NO: 813992 - RNA, 20 nt, Artificial Sequence
  Synthetic
uucucucaagggauccacau

SEQ ID NO: 813993 - RNA, 20 nt, Artificial Sequence
  Synthetic
uggcugcagcaauuccacau

SEQ ID NO: 813994 - RNA, 20 nt, Artificial Sequence
  Synthetic
ucugcccaugcuuuccacau

SEQ ID NO: 813995 - RNA, 20 nt, Artificial Sequence
  Synthetic
auuuguuaagacaagcacau

SEQ ID NO: 813996 - RNA, 20 nt, Artificial Sequence
  Synthetic
uauuguagcuauaagcacau

SEQ ID NO: 813997 - RNA, 20 nt, Artificial Sequence
  Synthetic
ugccugcaaucccagcacau

SEQ ID NO: 813998 - RNA, 20 nt, Artificial Sequence
  Synthetic
ugaaaaccuuggcagcacau

SEQ ID NO: 813999 - RNA, 20 nt, Artificial Sequence
  Synthetic
augugcaauaucuagcacau

SEQ ID NO: 814000 - RNA, 20 nt, Artificial Sequence
  Synthetic
cauguccuuuguaggcacau

SEQ ID NO: 814001 - RNA, 20 nt, Artificial Sequence
  Synthetic
uaucagcaauuugggcacau

SEQ ID NO: 814002 - RNA, 20 nt, Artificial Sequence
  Synthetic
ugaacccaugccuggcacau

SEQ ID NO: 814003 - RNA, 20 nt, Artificial Sequence
  Synthetic
aucugaaagucacugcacau

SEQ ID NO: 814004 - RNA, 20 nt, Artificial Sequence
  Synthetic
augcccaguagagugcacau

SEQ ID NO: 814005 - RNA, 20 nt, Artificial Sequence
  Synthetic
augugcuagauauugcacau

SEQ ID NO: 814006 - RNA, 20 nt, Artificial Sequence
  Synthetic
uauuaaacacuuuugcacau

SEQ ID NO: 814007 - RNA, 20 nt, Artificial Sequence
  Synthetic
aaaauucaggccaaucacau

SEQ ID NO: 814008 - RNA, 20 nt, Artificial Sequence
  Synthetic
agacacauaaacacucacau

SEQ ID NO: 814009 - RNA, 20 nt, Artificial Sequence
  Synthetic
cuccagccauggccucacau

SEQ ID NO: 814010 - RNA, 20 nt, Artificial Sequence
  Synthetic
ccaaaauaaccuccucacau

SEQ ID NO: 814011 - RNA, 20 nt, Artificial Sequence
  Synthetic
ugaagagguagagcucacau

SEQ ID NO: 814012 - RNA, 20 nt, Artificial Sequence
  Synthetic
acucauauggauucucacau

SEQ ID NO: 814013 - RNA, 20 nt, Artificial Sequence
  Synthetic
uagaaaguguuuucucacau

SEQ ID NO: 814014 - RNA, 20 nt, Artificial Sequence
  Synthetic
acaauguguaacagucacau

SEQ ID NO: 814015 - RNA, 20 nt, Artificial Sequence
  Synthetic
cuccagugucccugucacau

SEQ ID NO: 814016 - RNA, 20 nt, Artificial Sequence
  Synthetic
cugauuacuuaaauucacau

SEQ ID NO: 814017 - RNA, 20 nt, Artificial Sequence
  Synthetic
uacaauuuagucauucacau

SEQ ID NO: 814018 - RNA, 20 nt, Artificial Sequence
  Synthetic
ucaucuuuuaauguucacau

SEQ ID NO: 814019 - RNA, 20 nt, Artificial Sequence
  Synthetic
uuuccagccccauuucacau

SEQ ID NO: 814020 - RNA, 20 nt, Artificial Sequence
  Synthetic
uuucucaaauaaaaagacau

SEQ ID NO: 814021 - RNA, 20 nt, Artificial Sequence
  Synthetic
cauaaacaaagaaaagacau

SEQ ID NO: 814022 - RNA, 20 nt, Artificial Sequence
  Synthetic
uuagccuuuaagaaagacau

SEQ ID NO: 814023 - RNA, 20 nt, Artificial Sequence
  Synthetic
augguagaguagaaagacau

SEQ ID NO: 814024 - RNA, 20 nt, Artificial Sequence
  Synthetic
uagaugguuuuuaaagacau

SEQ ID NO: 814025 - RNA, 20 nt, Artificial Sequence
  Synthetic
cccacaaaggaggaagacau

SEQ ID NO: 814026 - RNA, 20 nt, Artificial Sequence
  Synthetic
uagacggagauugaagacau

SEQ ID NO: 814027 - RNA, 20 nt, Artificial Sequence
  Synthetic
ucuauaucacucuaagacau

SEQ ID NO: 814028 - RNA, 20 nt, Artificial Sequence
  Synthetic
cuuuaaagucaaacagacau

SEQ ID NO: 814029 - RNA, 20 nt, Artificial Sequence
  Synthetic
aagaaaugugggacagacau

SEQ ID NO: 814030 - RNA, 20 nt, Artificial Sequence
  Synthetic
aacaaauguuaagcagacau

SEQ ID NO: 814031 - RNA, 20 nt, Artificial Sequence
  Synthetic
cauauggaagaaauagacau

SEQ ID NO: 814032 - RNA, 20 nt, Artificial Sequence
  Synthetic
aagugcaguuaaauagacau

SEQ ID NO: 814033 - RNA, 20 nt, Artificial Sequence
  Synthetic
aaggugaaaacaauagacau

SEQ ID NO: 814034 - RNA, 20 nt, Artificial Sequence
  Synthetic
agagaaugcacaauagacau

SEQ ID NO: 814035 - RNA, 20 nt, Artificial Sequence
  Synthetic
cauugauaauugguagacau

SEQ ID NO: 814036 - RNA, 20 nt, Artificial Sequence
  Synthetic
uuacuuuaaauguuagacau

SEQ ID NO: 814037 - RNA, 20 nt, Artificial Sequence
  Synthetic
cuggggauuaaaaaggacau

SEQ ID NO: 814038 - RNA, 20 nt, Artificial Sequence
  Synthetic
aagguugagucaaaggacau

SEQ ID NO: 814039 - RNA, 20 nt, Artificial Sequence
  Synthetic
ucuguuaaaaugcaggacau

SEQ ID NO: 814040 - RNA, 20 nt, Artificial Sequence
  Synthetic
aguuuauguuuauaggacau

SEQ ID NO: 814041 - RNA, 20 nt, Artificial Sequence
  Synthetic
uucuuucuuggaagggacau

SEQ ID NO: 814042 - RNA, 20 nt, Artificial Sequence
  Synthetic
cugggaaaaugaagggacau

SEQ ID NO: 814043 - RNA, 20 nt, Artificial Sequence
  Synthetic
cugccuucaaacugggacau

SEQ ID NO: 814044 - RNA, 20 nt, Artificial Sequence
  Synthetic
uucugcuaaucaauggacau

SEQ ID NO: 814045 - RNA, 20 nt, Artificial Sequence
  Synthetic
agagaagagcuccaugacau

SEQ ID NO: 814046 - RNA, 20 nt, Artificial Sequence
  Synthetic
caaagcuaggaaacugacau

SEQ ID NO: 814047 - RNA, 20 nt, Artificial Sequence
  Synthetic
caaacccaauaaacugacau

SEQ ID NO: 814048 - RNA, 20 nt, Artificial Sequence
  Synthetic
aaaguaauguucacugacau

SEQ ID NO: 814049 - RNA, 20 nt, Artificial Sequence
  Synthetic
agggaaaaauuuccugacau

SEQ ID NO: 814050 - RNA, 20 nt, Artificial Sequence
  Synthetic
ccgauaucaugcagugacau

SEQ ID NO: 814051 - RNA, 20 nt, Artificial Sequence
  Synthetic
ucaaaguaaguuggugacau

SEQ ID NO: 814052 - RNA, 20 nt, Artificial Sequence
  Synthetic
uauuuaaauagaugugacau

SEQ ID NO: 814053 - RNA, 20 nt, Artificial Sequence
  Synthetic
acucuggucaucugugacau

SEQ ID NO: 814054 - RNA, 20 nt, Artificial Sequence
  Synthetic
uuauugggagcuugugacau

SEQ ID NO: 814055 - RNA, 20 nt, Artificial Sequence
  Synthetic
cagaaauaaacguuugacau

SEQ ID NO: 814056 - RNA, 20 nt, Artificial Sequence
  Synthetic
uguuuauaagaaaaauacau

SEQ ID NO: 814057 - RNA, 20 nt, Artificial Sequence
  Synthetic
auaaauaaauaaaaauacau

SEQ ID NO: 814058 - RNA, 20 nt, Artificial Sequence
  Synthetic
ugacagaaaacaaaauacau

SEQ ID NO: 814059 - RNA, 20 nt, Artificial Sequence
  Synthetic
uuauaaugauuaaaauacau

SEQ ID NO: 814060 - RNA, 20 nt, Artificial Sequence
  Synthetic
caaagugacuucaaauacau

SEQ ID NO: 814061 - RNA, 20 nt, Artificial Sequence
  Synthetic
ccccaagaagaagaauacau

SEQ ID NO: 814062 - RNA, 20 nt, Artificial Sequence
  Synthetic
agaacugugagugaauacau

SEQ ID NO: 814063 - RNA, 20 nt, Artificial Sequence
  Synthetic
augaauaauuuugaauacau

SEQ ID NO: 814064 - RNA, 20 nt, Artificial Sequence
  Synthetic
aggaaaaugaacuaauacau

SEQ ID NO: 814065 - RNA, 20 nt, Artificial Sequence
  Synthetic
uuucuguaagucuaauacau

SEQ ID NO: 814066 - RNA, 20 nt, Artificial Sequence
  Synthetic
uuugcaguaauguaauacau

SEQ ID NO: 814067 - RNA, 20 nt, Artificial Sequence
  Synthetic
uuucugguuauaucauacau

SEQ ID NO: 814068 - RNA, 20 nt, Artificial Sequence
  Synthetic
ucccaagaagucucauacau

SEQ ID NO: 814069 - RNA, 20 nt, Artificial Sequence
  Synthetic
uagaaaacuuucagauacau

SEQ ID NO: 814070 - RNA, 20 nt, Artificial Sequence
  Synthetic
uccugggaaaacugauacau

SEQ ID NO: 814071 - RNA, 20 nt, Artificial Sequence
  Synthetic
cucagacauuugugauacau

SEQ ID NO: 814072 - RNA, 20 nt, Artificial Sequence
  Synthetic
auuuuaauaggccuauacau

SEQ ID NO: 814073 - RNA, 20 nt, Artificial Sequence
  Synthetic
uauguaaguguaguauacau

SEQ ID NO: 814074 - RNA, 20 nt, Artificial Sequence
  Synthetic
aaguuuuauaguguauacau

SEQ ID NO: 814075 - RNA, 20 nt, Artificial Sequence
  Synthetic
aagacaagaauuaacuacau

SEQ ID NO: 814076 - RNA, 20 nt, Artificial Sequence
  Synthetic
uuauacacaaaucacuacau

SEQ ID NO: 814077 - RNA, 20 nt, Artificial Sequence
  Synthetic
auauugucagaagacuacau

SEQ ID NO: 814078 - RNA, 20 nt, Artificial Sequence
  Synthetic
uguccuucuugugacuacau

SEQ ID NO: 814079 - RNA, 20 nt, Artificial Sequence
  Synthetic
cuuuauucuuacaccuacau

SEQ ID NO: 814080 - RNA, 20 nt, Artificial Sequence
  Synthetic
acaugagccuaggccuacau

SEQ ID NO: 814081 - RNA, 20 nt, Artificial Sequence
  Synthetic
aacaacauauuuuccuacau

SEQ ID NO: 814082 - RNA, 20 nt, Artificial Sequence
  Synthetic
uggaggaugaaaagcuacau

SEQ ID NO: 814083 - RNA, 20 nt, Artificial Sequence
  Synthetic
cagaacauucccugcuacau

SEQ ID NO: 814084 - RNA, 20 nt, Artificial Sequence
  Synthetic
ucugccuuguaugucuacau

SEQ ID NO: 814085 - RNA, 20 nt, Artificial Sequence
  Synthetic
uugaaauaaauauucuacau

SEQ ID NO: 814086 - RNA, 20 nt, Artificial Sequence
  Synthetic
ucauauuucaaaaaguacau

SEQ ID NO: 814087 - RNA, 20 nt, Artificial Sequence
  Synthetic
uugacagguggaaaguacau

SEQ ID NO: 814088 - RNA, 20 nt, Artificial Sequence
  Synthetic
aaaguuauuaggaaguacau

SEQ ID NO: 814089 - RNA, 20 nt, Artificial Sequence
  Synthetic
cauugcucugcaugguacau

SEQ ID NO: 814090 - RNA, 20 nt, Artificial Sequence
  Synthetic
uucuaagauucaugguacau

SEQ ID NO: 814091 - RNA, 20 nt, Artificial Sequence
  Synthetic
augugcuagauauuguacau

SEQ ID NO: 814092 - RNA, 20 nt, Artificial Sequence
  Synthetic
agacauucauaaaauuacau

SEQ ID NO: 814093 - RNA, 20 nt, Artificial Sequence
  Synthetic
aagcaaugcuaaaauuacau

SEQ ID NO: 814094 - RNA, 20 nt, Artificial Sequence
  Synthetic
uagaauacuuaagauuacau

SEQ ID NO: 814095 - RNA, 20 nt, Artificial Sequence
  Synthetic
acucuccacuaauauuacau

SEQ ID NO: 814096 - RNA, 20 nt, Artificial Sequence
  Synthetic
cauauccuguauuauuacau

SEQ ID NO: 814097 - RNA, 20 nt, Artificial Sequence
  Synthetic
ugguauuauuauuauuacau

SEQ ID NO: 814098 - RNA, 20 nt, Artificial Sequence
  Synthetic
aaauacaaccuuuauuacau

SEQ ID NO: 814099 - RNA, 20 nt, Artificial Sequence
  Synthetic
caugugaagguuuauuacau

SEQ ID NO: 814100 - RNA, 20 nt, Artificial Sequence
  Synthetic
cugcugugcagaccuuacau

SEQ ID NO: 814101 - RNA, 20 nt, Artificial Sequence
  Synthetic
agacacaaccacucuuacau

SEQ ID NO: 814102 - RNA, 20 nt, Artificial Sequence
  Synthetic
auguagcacugcaguuacau

SEQ ID NO: 814103 - RNA, 20 nt, Artificial Sequence
  Synthetic
auaugggggagggguuacau

SEQ ID NO: 814104 - RNA, 20 nt, Artificial Sequence
  Synthetic
caaacagacauggguuacau

SEQ ID NO: 814105 - RNA, 20 nt, Artificial Sequence
  Synthetic
uauugucaucuugguuacau

SEQ ID NO: 814106 - RNA, 20 nt, Artificial Sequence
  Synthetic
agugcuguguaauguuacau

SEQ ID NO: 814107 - RNA, 20 nt, Artificial Sequence
  Synthetic
ccuaugcaggauuguuacau

SEQ ID NO: 814108 - RNA, 20 nt, Artificial Sequence
  Synthetic
aacgugcagauuuguuacau

SEQ ID NO: 814109 - RNA, 20 nt, Artificial Sequence
  Synthetic
cacgugcaaguuuguuacau

SEQ ID NO: 814110 - RNA, 20 nt, Artificial Sequence
  Synthetic
aauguacagguuuguuacau

SEQ ID NO: 814111 - RNA, 20 nt, Artificial Sequence
  Synthetic
aaagugcagguuuguuacau

SEQ ID NO: 814112 - RNA, 20 nt, Artificial Sequence
  Synthetic
aacgugcagguuuguuacau

SEQ ID NO: 814113 - RNA, 20 nt, Artificial Sequence
  Synthetic
caugugcagguuuguuacau

SEQ ID NO: 814114 - RNA, 20 nt, Artificial Sequence
  Synthetic
acaauauauguuuguuacau

SEQ ID NO: 814115 - RNA, 20 nt, Artificial Sequence
  Synthetic
uuuaggucuucaauuuacau

SEQ ID NO: 814116 - RNA, 20 nt, Artificial Sequence
  Synthetic
accaauaauuccauuuacau

SEQ ID NO: 814117 - RNA, 20 nt, Artificial Sequence
  Synthetic
uaugcaguuauuauuuacau

SEQ ID NO: 814118 - RNA, 20 nt, Artificial Sequence
  Synthetic
uaucccccccuccuuuacau

SEQ ID NO: 814119 - RNA, 20 nt, Artificial Sequence
  Synthetic
ugugggcugaugguuuacau

SEQ ID NO: 814120 - RNA, 20 nt, Artificial Sequence
  Synthetic
ucuguccagaccuuuuacau

SEQ ID NO: 814121 - RNA, 20 nt, Artificial Sequence
  Synthetic
aguaacucauuguuuuacau

SEQ ID NO: 814122 - RNA, 20 nt, Artificial Sequence
  Synthetic
cuuuugcccacuuuuuacau

SEQ ID NO: 814123 - RNA, 20 nt, Artificial Sequence
  Synthetic
aaacccaaacagaaaaccau

SEQ ID NO: 814124 - RNA, 20 nt, Artificial Sequence
  Synthetic
cacuauguugauaaaaccau

SEQ ID NO: 814125 - RNA, 20 nt, Artificial Sequence
  Synthetic
aaagccccuuauaaaaccau

SEQ ID NO: 814126 - RNA, 20 nt, Artificial Sequence
  Synthetic
aagcccucaagggaaaccau

SEQ ID NO: 814127 - RNA, 20 nt, Artificial Sequence
  Synthetic
cucucagauucauaaaccau

SEQ ID NO: 814128 - RNA, 20 nt, Artificial Sequence
  Synthetic
uagacggcacuuucaaccau

SEQ ID NO: 814129 - RNA, 20 nt, Artificial Sequence
  Synthetic
agcccagaaaccagaaccau

SEQ ID NO: 814130 - RNA, 20 nt, Artificial Sequence
  Synthetic
uagagucuuaccagaaccau

SEQ ID NO: 814131 - RNA, 20 nt, Artificial Sequence
  Synthetic
ccuuaauauaucagaaccau

SEQ ID NO: 814132 - RNA, 20 nt, Artificial Sequence
  Synthetic
acauaaauaaucaacaccau

SEQ ID NO: 814133 - RNA, 20 nt, Artificial Sequence
  Synthetic
uaacacagaaaccacaccau

SEQ ID NO: 814134 - RNA, 20 nt, Artificial Sequence
  Synthetic
aauugacacauauacaccau

SEQ ID NO: 814135 - RNA, 20 nt, Artificial Sequence
  Synthetic
caggguuauagccccaccau

SEQ ID NO: 814136 - RNA, 20 nt, Artificial Sequence
  Synthetic
uaucacaagaacagcaccau

SEQ ID NO: 814137 - RNA, 20 nt, Artificial Sequence
  Synthetic
uccaguuuucccagcaccau

SEQ ID NO: 814138 - RNA, 20 nt, Artificial Sequence
  Synthetic
uuauuuuguuaaugcaccau

SEQ ID NO: 814139 - RNA, 20 nt, Artificial Sequence
  Synthetic
uucaucguccacaucaccau

SEQ ID NO: 814140 - RNA, 20 nt, Artificial Sequence
  Synthetic
aagaggaauauauucaccau

SEQ ID NO: 814141 - RNA, 20 nt, Artificial Sequence
  Synthetic
cuguuuuguugccagaccau

SEQ ID NO: 814142 - RNA, 20 nt, Artificial Sequence
  Synthetic
aacacaaaagaauagaccau

SEQ ID NO: 814143 - RNA, 20 nt, Artificial Sequence
  Synthetic
aaaguaauaaauaggaccau

SEQ ID NO: 814144 - RNA, 20 nt, Artificial Sequence
  Synthetic
aauaauacuuuagugaccau

SEQ ID NO: 814145 - RNA, 20 nt, Artificial Sequence
  Synthetic
uucagacagcaguugaccau

SEQ ID NO: 814146 - RNA, 20 nt, Artificial Sequence
  Synthetic
cacaaaacguaaaauaccau

SEQ ID NO: 814147 - RNA, 20 nt, Artificial Sequence
  Synthetic
uaaaaggucaguaauaccau

SEQ ID NO: 814148 - RNA, 20 nt, Artificial Sequence
  Synthetic
uuguuuuaaaugcauaccau

SEQ ID NO: 814149 - RNA, 20 nt, Artificial Sequence
  Synthetic
uaacuucgagauuauaccau

SEQ ID NO: 814150 - RNA, 20 nt, Artificial Sequence
  Synthetic
auaaggacaauaucuaccau

SEQ ID NO: 814151 - RNA, 20 nt, Artificial Sequence
  Synthetic
acugaaaacagaauuaccau

SEQ ID NO: 814152 - RNA, 20 nt, Artificial Sequence
  Synthetic
ugcaucuuaaccauuaccau

SEQ ID NO: 814153 - RNA, 20 nt, Artificial Sequence
  Synthetic
uaaaugaauuauauuaccau

SEQ ID NO: 814154 - RNA, 20 nt, Artificial Sequence
  Synthetic
aaugaaaccaaucuuaccau

SEQ ID NO: 814155 - RNA, 20 nt, Artificial Sequence
  Synthetic
cauaugguugcuuuuaccau

SEQ ID NO: 814156 - RNA, 20 nt, Artificial Sequence
  Synthetic
aaagcaauuuucacacccau

SEQ ID NO: 814157 - RNA, 20 nt, Artificial Sequence
  Synthetic
cagaaagagaugacacccau

SEQ ID NO: 814158 - RNA, 20 nt, Artificial Sequence
  Synthetic
ccucuguggaaaccacccau

SEQ ID NO: 814159 - RNA, 20 nt, Artificial Sequence
  Synthetic
uggugauaaauaccacccau

SEQ ID NO: 814160 - RNA, 20 nt, Artificial Sequence
  Synthetic
cucuggaacuucugacccau

SEQ ID NO: 814161 - RNA, 20 nt, Artificial Sequence
  Synthetic
augugccuuagcauacccau

SEQ ID NO: 814162 - RNA, 20 nt, Artificial Sequence
  Synthetic
cacuuaaaacuuauacccau

SEQ ID NO: 814163 - RNA, 20 nt, Artificial Sequence
  Synthetic
cugccaacaauucuacccau

SEQ ID NO: 814164 - RNA, 20 nt, Artificial Sequence
  Synthetic
uucucauuuacuuuacccau

SEQ ID NO: 814165 - RNA, 20 nt, Artificial Sequence
  Synthetic
acauagaugagaaaccccau

SEQ ID NO: 814166 - RNA, 20 nt, Artificial Sequence
  Synthetic
augguccugggucaccccau

SEQ ID NO: 814167 - RNA, 20 nt, Artificial Sequence
  Synthetic
ccuguacccuuuccccccau

SEQ ID NO: 814168 - RNA, 20 nt, Artificial Sequence
  Synthetic
ucuggugaguccucccccau

SEQ ID NO: 814169 - RNA, 20 nt, Artificial Sequence
  Synthetic
cagcaucaaucuggccccau

SEQ ID NO: 814170 - RNA, 20 nt, Artificial Sequence
  Synthetic
auuugucuuuuucuccccau

SEQ ID NO: 814171 - RNA, 20 nt, Artificial Sequence
  Synthetic
aaccccaacuugaagcccau

SEQ ID NO: 814172 - RNA, 20 nt, Artificial Sequence
  Synthetic
aucuuaagaggccagcccau

SEQ ID NO: 814173 - RNA, 20 nt, Artificial Sequence
  Synthetic
aacauaguuagauagcccau

SEQ ID NO: 814174 - RNA, 20 nt, Artificial Sequence
  Synthetic
ucaaggagauuuuagcccau

SEQ ID NO: 814175 - RNA, 20 nt, Artificial Sequence
  Synthetic
cuguaaaauuauaugcccau

SEQ ID NO: 814176 - RNA, 20 nt, Artificial Sequence
  Synthetic
acucuugagcaucugcccau

SEQ ID NO: 814177 - RNA, 20 nt, Artificial Sequence
  Synthetic
auagcugaacuguugcccau

SEQ ID NO: 814178 - RNA, 20 nt, Artificial Sequence
  Synthetic
uccauuguucuuuugcccau

SEQ ID NO: 814179 - RNA, 20 nt, Artificial Sequence
  Synthetic
caaggacuuggccaucccau

SEQ ID NO: 814180 - RNA, 20 nt, Artificial Sequence
  Synthetic
cacacuugcuacuaucccau

SEQ ID NO: 814181 - RNA, 20 nt, Artificial Sequence
  Synthetic
cuaguuuugcuguaucccau

SEQ ID NO: 814182 - RNA, 20 nt, Artificial Sequence
  Synthetic
ugagauguacuaacucccau

SEQ ID NO: 814183 - RNA, 20 nt, Artificial Sequence
  Synthetic
uuacguagguuaacucccau

SEQ ID NO: 814184 - RNA, 20 nt, Artificial Sequence
  Synthetic
accuauagucuuucucccau

SEQ ID NO: 814185 - RNA, 20 nt, Artificial Sequence
  Synthetic
uuauuucuucuuugucccau

SEQ ID NO: 814186 - RNA, 20 nt, Artificial Sequence
  Synthetic
cagccacauuaaauucccau

SEQ ID NO: 814187 - RNA, 20 nt, Artificial Sequence
  Synthetic
ugugaucugggaauucccau

SEQ ID NO: 814188 - RNA, 20 nt, Artificial Sequence
  Synthetic
uccagucugcucuuucccau

SEQ ID NO: 814189 - RNA, 20 nt, Artificial Sequence
  Synthetic
cccuccacaaauuuucccau

SEQ ID NO: 814190 - RNA, 20 nt, Artificial Sequence
  Synthetic
uuuuguuaacuuuuucccau

SEQ ID NO: 814191 - RNA, 20 nt, Artificial Sequence
  Synthetic
uguaucgaguguaaagccau

SEQ ID NO: 814192 - RNA, 20 nt, Artificial Sequence
  Synthetic
uauauucuaucacaagccau

SEQ ID NO: 814193 - RNA, 20 nt, Artificial Sequence
  Synthetic
augcagaauuccuaagccau

SEQ ID NO: 814194 - RNA, 20 nt, Artificial Sequence
  Synthetic
uaaauuaaauguuaagccau

SEQ ID NO: 814195 - RNA, 20 nt, Artificial Sequence
  Synthetic
uuccugauccagccagccau

SEQ ID NO: 814196 - RNA, 20 nt, Artificial Sequence
  Synthetic
augaggugcaaagcagccau

SEQ ID NO: 814197 - RNA, 20 nt, Artificial Sequence
  Synthetic
auuguuuugaacauagccau

SEQ ID NO: 814198 - RNA, 20 nt, Artificial Sequence
  Synthetic
cuugcacccucuguagccau

SEQ ID NO: 814199 - RNA, 20 nt, Artificial Sequence
  Synthetic
ucugucucucuucccgccau

SEQ ID NO: 814200 - RNA, 20 nt, Artificial Sequence
  Synthetic
aaaccaugagaguaggccau

SEQ ID NO: 814201 - RNA, 20 nt, Artificial Sequence
  Synthetic
auggggugggguggggccau

SEQ ID NO: 814202 - RNA, 20 nt, Artificial Sequence
  Synthetic
cuuuaauguugccaugccau

SEQ ID NO: 814203 - RNA, 20 nt, Artificial Sequence
  Synthetic
augaugacuaaauaugccau

SEQ ID NO: 814204 - RNA, 20 nt, Artificial Sequence
  Synthetic
aggcaaaaauaguaugccau

SEQ ID NO: 814205 - RNA, 20 nt, Artificial Sequence
  Synthetic
uauggaauuauuuaugccau

SEQ ID NO: 814206 - RNA, 20 nt, Artificial Sequence
  Synthetic
ucuaaguuucacucugccau

SEQ ID NO: 814207 - RNA, 20 nt, Artificial Sequence
  Synthetic
uauauuggaauccuugccau

SEQ ID NO: 814208 - RNA, 20 nt, Artificial Sequence
  Synthetic
auuuuggcuuuuguugccau

SEQ ID NO: 814209 - RNA, 20 nt, Artificial Sequence
  Synthetic
cccacauuuuuuuuugccau

SEQ ID NO: 814210 - RNA, 20 nt, Artificial Sequence
  Synthetic
aauguauuugccaaauccau

SEQ ID NO: 814211 - RNA, 20 nt, Artificial Sequence
  Synthetic
ccaugcuccaagaaauccau

SEQ ID NO: 814212 - RNA, 20 nt, Artificial Sequence
  Synthetic
cugauuaauugggaauccau

SEQ ID NO: 814213 - RNA, 20 nt, Artificial Sequence
  Synthetic
acuaaaaucuaaacauccau

SEQ ID NO: 814214 - RNA, 20 nt, Artificial Sequence
  Synthetic
auguacuaugacacauccau

SEQ ID NO: 814215 - RNA, 20 nt, Artificial Sequence
  Synthetic
uaaaugcauacuccauccau

SEQ ID NO: 814216 - RNA, 20 nt, Artificial Sequence
  Synthetic
caccuugcagguggauccau

SEQ ID NO: 814217 - RNA, 20 nt, Artificial Sequence
  Synthetic
cauaucauuagaugauccau

SEQ ID NO: 814218 - RNA, 20 nt, Artificial Sequence
  Synthetic
aaggccugcaugauauccau

SEQ ID NO: 814219 - RNA, 20 nt, Artificial Sequence
  Synthetic
acaaagugcuguauauccau

SEQ ID NO: 814220 - RNA, 20 nt, Artificial Sequence
  Synthetic
cccaugccaaaaguauccau

SEQ ID NO: 814221 - RNA, 20 nt, Artificial Sequence
  Synthetic
aauugucccucaguauccau

SEQ ID NO: 814222 - RNA, 20 nt, Artificial Sequence
  Synthetic
aguuggcccucuguauccau

SEQ ID NO: 814223 - RNA, 20 nt, Artificial Sequence
  Synthetic
cacuuuugcucacacuccau

SEQ ID NO: 814224 - RNA, 20 nt, Artificial Sequence
  Synthetic
accaacaauauucacuccau

SEQ ID NO: 814225 - RNA, 20 nt, Artificial Sequence
  Synthetic
aaacaacugcucuacuccau

SEQ ID NO: 814226 - RNA, 20 nt, Artificial Sequence
  Synthetic
uguucuacuagcaccuccau

SEQ ID NO: 814227 - RNA, 20 nt, Artificial Sequence
  Synthetic
cagaggacuggcuccuccau

SEQ ID NO: 814228 - RNA, 20 nt, Artificial Sequence
  Synthetic
ccaugggcucccaucuccau

SEQ ID NO: 814229 - RNA, 20 nt, Artificial Sequence
  Synthetic
uuuaaaauggcuaucuccau

SEQ ID NO: 814230 - RNA, 20 nt, Artificial Sequence
  Synthetic
uucaccugaccugucuccau

SEQ ID NO: 814231 - RNA, 20 nt, Artificial Sequence
  Synthetic
aauugagacuauuucuccau

SEQ ID NO: 814232 - RNA, 20 nt, Artificial Sequence
  Synthetic
uuuaaaccaccuuucuccau

SEQ ID NO: 814233 - RNA, 20 nt, Artificial Sequence
  Synthetic
ccuugaauguuuuucuccau

SEQ ID NO: 814234 - RNA, 20 nt, Artificial Sequence
  Synthetic
uuccauccagagaaguccau

SEQ ID NO: 814235 - RNA, 20 nt, Artificial Sequence
  Synthetic
agacuagaccucugguccau

SEQ ID NO: 814236 - RNA, 20 nt, Artificial Sequence
  Synthetic
uugaagaaauuacuguccau

SEQ ID NO: 814237 - RNA, 20 nt, Artificial Sequence
  Synthetic
cuggagaaugagguguccau

SEQ ID NO: 814238 - RNA, 20 nt, Artificial Sequence
  Synthetic
aucccccagcuuuuguccau

SEQ ID NO: 814239 - RNA, 20 nt, Artificial Sequence
  Synthetic
aaaacugauauaaauuccau

SEQ ID NO: 814240 - RNA, 20 nt, Artificial Sequence
  Synthetic
auaaacuucaccaauuccau

SEQ ID NO: 814241 - RNA, 20 nt, Artificial Sequence
  Synthetic
uguguucacaagaauuccau

SEQ ID NO: 814242 - RNA, 20 nt, Artificial Sequence
  Synthetic
ugcaaccagaaagauuccau

SEQ ID NO: 814243 - RNA, 20 nt, Artificial Sequence
  Synthetic
ugggcugcauaauauuccau

SEQ ID NO: 814244 - RNA, 20 nt, Artificial Sequence
  Synthetic
aguuucccuuuguauuccau

SEQ ID NO: 814245 - RNA, 20 nt, Artificial Sequence
  Synthetic
uccucuuugucuuauuccau

SEQ ID NO: 814246 - RNA, 20 nt, Artificial Sequence
  Synthetic
cuuccaaacauagcuuccau

SEQ ID NO: 814247 - RNA, 20 nt, Artificial Sequence
  Synthetic
caaaaugauauuucuuccau

SEQ ID NO: 814248 - RNA, 20 nt, Artificial Sequence
  Synthetic
uucugaggccucuguuccau

SEQ ID NO: 814249 - RNA, 20 nt, Artificial Sequence
  Synthetic
aggcuuccguucuguuccau

SEQ ID NO: 814250 - RNA, 20 nt, Artificial Sequence
  Synthetic
uggccucuguucuguuccau

SEQ ID NO: 814251 - RNA, 20 nt, Artificial Sequence
  Synthetic
agagcucuguucuguuccau

SEQ ID NO: 814252 - RNA, 20 nt, Artificial Sequence
  Synthetic
uaaacuccaacacuuuccau

SEQ ID NO: 814253 - RNA, 20 nt, Artificial Sequence
  Synthetic
aagaacuuaaaucuuuccau

SEQ ID NO: 814254 - RNA, 20 nt, Artificial Sequence
  Synthetic
uauuguuucucaguuuccau

SEQ ID NO: 814255 - RNA, 20 nt, Artificial Sequence
  Synthetic
uugugucagugaguuuccau

SEQ ID NO: 814256 - RNA, 20 nt, Artificial Sequence
  Synthetic
ugcuagcuggaauuuuccau

SEQ ID NO: 814257 - RNA, 20 nt, Artificial Sequence
  Synthetic
uuauuauucccauuuuccau

SEQ ID NO: 814258 - RNA, 20 nt, Artificial Sequence
  Synthetic
uuaccugaaucuuuuuccau

SEQ ID NO: 814259 - RNA, 20 nt, Artificial Sequence
  Synthetic
aaucuaaaaauaaaaagcau

SEQ ID NO: 814260 - RNA, 20 nt, Artificial Sequence
  Synthetic
acaaauuugugcaaaagcau

SEQ ID NO: 814261 - RNA, 20 nt, Artificial Sequence
  Synthetic
ucuauuauaaugaaaagcau

SEQ ID NO: 814262 - RNA, 20 nt, Artificial Sequence
  Synthetic
cuccgcaccugacaaagcau

SEQ ID NO: 814263 - RNA, 20 nt, Artificial Sequence
  Synthetic
ugaaccuauguggaaagcau

SEQ ID NO: 814264 - RNA, 20 nt, Artificial Sequence
  Synthetic
agcuuugccuuugaaagcau

SEQ ID NO: 814265 - RNA, 20 nt, Artificial Sequence
  Synthetic
aauaaucagauaccaagcau

SEQ ID NO: 814266 - RNA, 20 nt, Artificial Sequence
  Synthetic
auauccaggaauccaagcau

SEQ ID NO: 814267 - RNA, 20 nt, Artificial Sequence
  Synthetic
aacccacuugccagaagcau

SEQ ID NO: 814268 - RNA, 20 nt, Artificial Sequence
  Synthetic
ugagugagauuaggaagcau

SEQ ID NO: 814269 - RNA, 20 nt, Artificial Sequence
  Synthetic
cauauuuuccacauaagcau

SEQ ID NO: 814270 - RNA, 20 nt, Artificial Sequence
  Synthetic
auuccucauaagguaagcau

SEQ ID NO: 814271 - RNA, 20 nt, Artificial Sequence
  Synthetic
agugauuucaaauuaagcau

SEQ ID NO: 814272 - RNA, 20 nt, Artificial Sequence
  Synthetic
ucaaaaaaaaaaaacagcau

SEQ ID NO: 814273 - RNA, 20 nt, Artificial Sequence
  Synthetic
aucacaugggaaaacagcau

SEQ ID NO: 814274 - RNA, 20 nt, Artificial Sequence
  Synthetic
uggcuuacauaaaacagcau

SEQ ID NO: 814275 - RNA, 20 nt, Artificial Sequence
  Synthetic
cacuaucacgacaacagcau

SEQ ID NO: 814276 - RNA, 20 nt, Artificial Sequence
  Synthetic
uacuaucacgagaacagcau

SEQ ID NO: 814277 - RNA, 20 nt, Artificial Sequence
  Synthetic
cacuaucaggagaacagcau

SEQ ID NO: 814278 - RNA, 20 nt, Artificial Sequence
  Synthetic
cacuaucaugagaacagcau

SEQ ID NO: 814279 - RNA, 20 nt, Artificial Sequence
  Synthetic
cgcuaucaugagaacagcau

SEQ ID NO: 814280 - RNA, 20 nt, Artificial Sequence
  Synthetic
uacaauggagguaccagcau

SEQ ID NO: 814281 - RNA, 20 nt, Artificial Sequence
  Synthetic
cauuccguuuuagccagcau

SEQ ID NO: 814282 - RNA, 20 nt, Artificial Sequence
  Synthetic
cucugcggccuugccagcau

SEQ ID NO: 814283 - RNA, 20 nt, Artificial Sequence
  Synthetic
agaguuucaaaauccagcau

SEQ ID NO: 814284 - RNA, 20 nt, Artificial Sequence
  Synthetic
uacccuacaauguccagcau

SEQ ID NO: 814285 - RNA, 20 nt, Artificial Sequence
  Synthetic
uaaaccuaaaugugcagcau

SEQ ID NO: 814286 - RNA, 20 nt, Artificial Sequence
  Synthetic
uaagaaaguaaaaucagcau

SEQ ID NO: 814287 - RNA, 20 nt, Artificial Sequence
  Synthetic
uggaagacgaauaucagcau

SEQ ID NO: 814288 - RNA, 20 nt, Artificial Sequence
  Synthetic
uugucuaaugaacucagcau

SEQ ID NO: 814289 - RNA, 20 nt, Artificial Sequence
  Synthetic
cagggucugucccucagcau

SEQ ID NO: 814290 - RNA, 20 nt, Artificial Sequence
  Synthetic
auagguaugucagucagcau

SEQ ID NO: 814291 - RNA, 20 nt, Artificial Sequence
  Synthetic
aagauuuuaaaguucagcau

SEQ ID NO: 814292 - RNA, 20 nt, Artificial Sequence
  Synthetic
auguagccuccuuucagcau

SEQ ID NO: 814293 - RNA, 20 nt, Artificial Sequence
  Synthetic
uuguuugauuuacagagcau

SEQ ID NO: 814294 - RNA, 20 nt, Artificial Sequence
  Synthetic
agggauguuauccagagcau

SEQ ID NO: 814295 - RNA, 20 nt, Artificial Sequence
  Synthetic
uuguucccuuuauagagcau

SEQ ID NO: 814296 - RNA, 20 nt, Artificial Sequence
  Synthetic
cagaaugucuagaggagcau

SEQ ID NO: 814297 - RNA, 20 nt, Artificial Sequence
  Synthetic
uugagggggauggggagcau

SEQ ID NO: 814298 - RNA, 20 nt, Artificial Sequence
  Synthetic
acaauguggguuuugagcau

SEQ ID NO: 814299 - RNA, 20 nt, Artificial Sequence
  Synthetic
aacaaaggaaacaauagcau

SEQ ID NO: 814300 - RNA, 20 nt, Artificial Sequence
  Synthetic
ccagguaaaaagaauagcau

SEQ ID NO: 814301 - RNA, 20 nt, Artificial Sequence
  Synthetic
cacuaucaugagaauagcau

SEQ ID NO: 814302 - RNA, 20 nt, Artificial Sequence
  Synthetic
aaaauagaauaagauagcau

SEQ ID NO: 814303 - RNA, 20 nt, Artificial Sequence
  Synthetic
cagauggagggugauagcau

SEQ ID NO: 814304 - RNA, 20 nt, Artificial Sequence
  Synthetic
acuaacuugucaucuagcau

SEQ ID NO: 814305 - RNA, 20 nt, Artificial Sequence
  Synthetic
auuguauguuagucuagcau

SEQ ID NO: 814306 - RNA, 20 nt, Artificial Sequence
  Synthetic
uggaucuauuaaaguagcau

SEQ ID NO: 814307 - RNA, 20 nt, Artificial Sequence
  Synthetic
acagaguaagauguuagcau

SEQ ID NO: 814308 - RNA, 20 nt, Artificial Sequence
  Synthetic
uuucacuucucauuuagcau

SEQ ID NO: 814309 - RNA, 20 nt, Artificial Sequence
  Synthetic
uaagaaguucuuuuuagcau

SEQ ID NO: 814310 - RNA, 20 nt, Artificial Sequence
  Synthetic
aucauguaguuagaacgcau

SEQ ID NO: 814311 - RNA, 20 nt, Artificial Sequence
  Synthetic
aacuuuuggagguaacgcau

SEQ ID NO: 814312 - RNA, 20 nt, Artificial Sequence
  Synthetic
uuucuuccaguugaucgcau

SEQ ID NO: 814313 - RNA, 20 nt, Artificial Sequence
  Synthetic
uguaauuagcacaaaggcau

SEQ ID NO: 814314 - RNA, 20 nt, Artificial Sequence
  Synthetic
accauucaggacaaaggcau

SEQ ID NO: 814315 - RNA, 20 nt, Artificial Sequence
  Synthetic
aauucugugaagaaaggcau

SEQ ID NO: 814316 - RNA, 20 nt, Artificial Sequence
  Synthetic
uauucacauaaucaaggcau

SEQ ID NO: 814317 - RNA, 20 nt, Artificial Sequence
  Synthetic
accauucaggauacaggcau

SEQ ID NO: 814318 - RNA, 20 nt, Artificial Sequence
  Synthetic
acaaugggggguacaggcau

SEQ ID NO: 814319 - RNA, 20 nt, Artificial Sequence
  Synthetic
cacaccuaugugccaggcau

SEQ ID NO: 814320 - RNA, 20 nt, Artificial Sequence
  Synthetic
caccaccuaaugucaggcau

SEQ ID NO: 814321 - RNA, 20 nt, Artificial Sequence
  Synthetic
ccucaaucuagaagaggcau

SEQ ID NO: 814322 - RNA, 20 nt, Artificial Sequence
  Synthetic
uuugaauguaggagaggcau

SEQ ID NO: 814323 - RNA, 20 nt, Artificial Sequence
  Synthetic
cucuuccacccuggaggcau

SEQ ID NO: 814324 - RNA, 20 nt, Artificial Sequence
  Synthetic
aauuuuguuuuaugaggcau

SEQ ID NO: 814325 - RNA, 20 nt, Artificial Sequence
  Synthetic
accauucaggacauaggcau

SEQ ID NO: 814326 - RNA, 20 nt, Artificial Sequence
  Synthetic
uuaaaucuuuccauaggcau

SEQ ID NO: 814327 - RNA, 20 nt, Artificial Sequence
  Synthetic
accauucaggauauaggcau

SEQ ID NO: 814328 - RNA, 20 nt, Artificial Sequence
  Synthetic
accauucaggacguaggcau

SEQ ID NO: 814329 - RNA, 20 nt, Artificial Sequence
  Synthetic
acagcgagggaauuaggcau

SEQ ID NO: 814330 - RNA, 20 nt, Artificial Sequence
  Synthetic
acaccacugcacuccggcau

SEQ ID NO: 814331 - RNA, 20 nt, Artificial Sequence
  Synthetic
aacuggaagccaaagggcau

SEQ ID NO: 814332 - RNA, 20 nt, Artificial Sequence
  Synthetic
aucaaauaaaaugagggcau

SEQ ID NO: 814333 - RNA, 20 nt, Artificial Sequence
  Synthetic
aacagaaaaccauagggcau

SEQ ID NO: 814334 - RNA, 20 nt, Artificial Sequence
  Synthetic
augaauuggauaaggggcau

SEQ ID NO: 814335 - RNA, 20 nt, Artificial Sequence
  Synthetic
acuuucuaucuguggggcau

SEQ ID NO: 814336 - RNA, 20 nt, Artificial Sequence
  Synthetic
uacucaguuuuacugggcau

SEQ ID NO: 814337 - RNA, 20 nt, Artificial Sequence
  Synthetic
aagaggagaacucugggcau

SEQ ID NO: 814338 - RNA, 20 nt, Artificial Sequence
  Synthetic
auucucccauuauugggcau

SEQ ID NO: 814339 - RNA, 20 nt, Artificial Sequence
  Synthetic
agagaagggguagauggcau

SEQ ID NO: 814340 - RNA, 20 nt, Artificial Sequence
  Synthetic
caggaacuccaggauggcau

SEQ ID NO: 814341 - RNA, 20 nt, Artificial Sequence
  Synthetic
ucuggacauugugcuggcau

SEQ ID NO: 814342 - RNA, 20 nt, Artificial Sequence
  Synthetic
auguguggguaaaguggcau

SEQ ID NO: 814343 - RNA, 20 nt, Artificial Sequence
  Synthetic
cguaggcagugcaguggcau

SEQ ID NO: 814344 - RNA, 20 nt, Artificial Sequence
  Synthetic
aaagaaaagagggguggcau

SEQ ID NO: 814345 - RNA, 20 nt, Artificial Sequence
  Synthetic
ugauucugcaguuguggcau

SEQ ID NO: 814346 - RNA, 20 nt, Artificial Sequence
  Synthetic
agguagagggauauuggcau

SEQ ID NO: 814347 - RNA, 20 nt, Artificial Sequence
  Synthetic
uuaagauaugaccuuggcau

SEQ ID NO: 814348 - RNA, 20 nt, Artificial Sequence
  Synthetic
aaauugguuaggcuuggcau

SEQ ID NO: 814349 - RNA, 20 nt, Artificial Sequence
  Synthetic
uaaaauuauaauuuuggcau

SEQ ID NO: 814350 - RNA, 20 nt, Artificial Sequence
  Synthetic
ccaauggauacuuuuggcau

SEQ ID NO: 814351 - RNA, 20 nt, Artificial Sequence
  Synthetic
cauacuuuuaaaaaaugcau

SEQ ID NO: 814352 - RNA, 20 nt, Artificial Sequence
  Synthetic
uaaaauauccuacaaugcau

SEQ ID NO: 814353 - RNA, 20 nt, Artificial Sequence
  Synthetic
aaaaaucaauaagaaugcau

SEQ ID NO: 814354 - RNA, 20 nt, Artificial Sequence
  Synthetic
aggacaaauaccuaaugcau

SEQ ID NO: 814355 - RNA, 20 nt, Artificial Sequence
  Synthetic
auacacaggacuuaaugcau

SEQ ID NO: 814356 - RNA, 20 nt, Artificial Sequence
  Synthetic
uaucaccuuguaucaugcau

SEQ ID NO: 814357 - RNA, 20 nt, Artificial Sequence
  Synthetic
uucacacagcuaagaugcau

SEQ ID NO: 814358 - RNA, 20 nt, Artificial Sequence
  Synthetic
acacagaugaagagaugcau

SEQ ID NO: 814359 - RNA, 20 nt, Artificial Sequence
  Synthetic
aaauuuuggaggugaugcau

SEQ ID NO: 814360 - RNA, 20 nt, Artificial Sequence
  Synthetic
uauguaaauaauaacugcau

SEQ ID NO: 814361 - RNA, 20 nt, Artificial Sequence
  Synthetic
accucacagaaccacugcau

SEQ ID NO: 814362 - RNA, 20 nt, Artificial Sequence
  Synthetic
aucccuaaauaugacugcau

SEQ ID NO: 814363 - RNA, 20 nt, Artificial Sequence
  Synthetic
aauauuaaauguuacugcau

SEQ ID NO: 814364 - RNA, 20 nt, Artificial Sequence
  Synthetic
ccuaacuguugucccugcau

SEQ ID NO: 814365 - RNA, 20 nt, Artificial Sequence
  Synthetic
cccauguaacaauccugcau

SEQ ID NO: 814366 - RNA, 20 nt, Artificial Sequence
  Synthetic
aggagcccugccagcugcau

SEQ ID NO: 814367 - RNA, 20 nt, Artificial Sequence
  Synthetic
auuuacaucugaggcugcau

SEQ ID NO: 814368 - RNA, 20 nt, Artificial Sequence
  Synthetic
caacuauuuauuggcugcau

SEQ ID NO: 814369 - RNA, 20 nt, Artificial Sequence
  Synthetic
uauccuccccauaucugcau

SEQ ID NO: 814370 - RNA, 20 nt, Artificial Sequence
  Synthetic
uuuuuagucauuuucugcau

SEQ ID NO: 814371 - RNA, 20 nt, Artificial Sequence
  Synthetic
uuuucuggauaucagugcau

SEQ ID NO: 814372 - RNA, 20 nt, Artificial Sequence
  Synthetic
cuagggaccuccuagugcau

SEQ ID NO: 814373 - RNA, 20 nt, Artificial Sequence
  Synthetic
caagguggugacaggugcau

SEQ ID NO: 814374 - RNA, 20 nt, Artificial Sequence
  Synthetic
acagcuugaaauaugugcau

SEQ ID NO: 814375 - RNA, 20 nt, Artificial Sequence
  Synthetic
aguaguauuccauugugcau

SEQ ID NO: 814376 - RNA, 20 nt, Artificial Sequence
  Synthetic
aacuaaccuuugaauugcau

SEQ ID NO: 814377 - RNA, 20 nt, Artificial Sequence
  Synthetic
cauagaugacaucauugcau

SEQ ID NO: 814378 - RNA, 20 nt, Artificial Sequence
  Synthetic
aagauuuucuguuauugcau

SEQ ID NO: 814379 - RNA, 20 nt, Artificial Sequence
  Synthetic
aucauaucaaagacuugcau

SEQ ID NO: 814380 - RNA, 20 nt, Artificial Sequence
  Synthetic
aaacagcuaaaaucuugcau

SEQ ID NO: 814381 - RNA, 20 nt, Artificial Sequence
  Synthetic
uuauagucuaggucuugcau

SEQ ID NO: 814382 - RNA, 20 nt, Artificial Sequence
  Synthetic
cuauuuucugugucuugcau

SEQ ID NO: 814383 - RNA, 20 nt, Artificial Sequence
  Synthetic
caccaaauauguuguugcau

SEQ ID NO: 814384 - RNA, 20 nt, Artificial Sequence
  Synthetic
aacgggcagguuuguugcau

SEQ ID NO: 814385 - RNA, 20 nt, Artificial Sequence
  Synthetic
aacgugcagguuuguugcau

SEQ ID NO: 814386 - RNA, 20 nt, Artificial Sequence
  Synthetic
ucuguugggcacauuugcau

SEQ ID NO: 814387 - RNA, 20 nt, Artificial Sequence
  Synthetic
aacauucuaucacuuugcau

SEQ ID NO: 814388 - RNA, 20 nt, Artificial Sequence
  Synthetic
auaccuuuuguucuuugcau

SEQ ID NO: 814389 - RNA, 20 nt, Artificial Sequence
  Synthetic
uuucaccuagaauuuugcau

SEQ ID NO: 814390 - RNA, 20 nt, Artificial Sequence
  Synthetic
aaucucuaaucauuuugcau

SEQ ID NO: 814391 - RNA, 20 nt, Artificial Sequence
  Synthetic
cagcugggaccuuuuugcau

SEQ ID NO: 814392 - RNA, 20 nt, Artificial Sequence
  Synthetic
caaauggaaaaaaaaaucau

SEQ ID NO: 814393 - RNA, 20 nt, Artificial Sequence
  Synthetic
auauuaaagaauaaaaucau

SEQ ID NO: 814394 - RNA, 20 nt, Artificial Sequence
  Synthetic
aauaaaaauguucaaaucau

SEQ ID NO: 814395 - RNA, 20 nt, Artificial Sequence
  Synthetic
acaugcuacaaagaaaucau

SEQ ID NO: 814396 - RNA, 20 nt, Artificial Sequence
  Synthetic
ucuuuucuugaauaaaucau

SEQ ID NO: 814397 - RNA, 20 nt, Artificial Sequence
  Synthetic
aaucugauuccauaaaucau

SEQ ID NO: 814398 - RNA, 20 nt, Artificial Sequence
  Synthetic
uucccaccacacccaaucau

SEQ ID NO: 814399 - RNA, 20 nt, Artificial Sequence
  Synthetic
cuucccuaauuagcaaucau

SEQ ID NO: 814400 - RNA, 20 nt, Artificial Sequence
  Synthetic
uacucaacaucgucaaucau

SEQ ID NO: 814401 - RNA, 20 nt, Artificial Sequence
  Synthetic
cuauuuuuuaauucaaucau

SEQ ID NO: 814402 - RNA, 20 nt, Artificial Sequence
  Synthetic
aggaauuguacaagaaucau

SEQ ID NO: 814403 - RNA, 20 nt, Artificial Sequence
  Synthetic
cacauauuucuaagaaucau

SEQ ID NO: 814404 - RNA, 20 nt, Artificial Sequence
  Synthetic
ccugugguaggcagaaucau

SEQ ID NO: 814405 - RNA, 20 nt, Artificial Sequence
  Synthetic
agcuguaaaagaugaaucau

SEQ ID NO: 814406 - RNA, 20 nt, Artificial Sequence
  Synthetic
uguggagguaauugaaucau

SEQ ID NO: 814407 - RNA, 20 nt, Artificial Sequence
  Synthetic
ugggaggucauuugaaucau

SEQ ID NO: 814408 - RNA, 20 nt, Artificial Sequence
  Synthetic
ccugaacuagagauaaucau

SEQ ID NO: 814409 - RNA, 20 nt, Artificial Sequence
  Synthetic
ugcucaacaucacuaaucau

SEQ ID NO: 814410 - RNA, 20 nt, Artificial Sequence
  Synthetic
uuuauuaguugucuaaucau

SEQ ID NO: 814411 - RNA, 20 nt, Artificial Sequence
  Synthetic
acaaacuuauaaaacaucau

SEQ ID NO: 814412 - RNA, 20 nt, Artificial Sequence
  Synthetic
cuaaaauguugccacaucau

SEQ ID NO: 814413 - RNA, 20 nt, Artificial Sequence
  Synthetic
ucagacaggaacuacaucau

SEQ ID NO: 814414 - RNA, 20 nt, Artificial Sequence
  Synthetic
auggcagccccucccaucau

SEQ ID NO: 814415 - RNA, 20 nt, Artificial Sequence
  Synthetic
uuuauuuaauuagccaucau

SEQ ID NO: 814416 - RNA, 20 nt, Artificial Sequence
  Synthetic
cauaauacaaaugccaucau

SEQ ID NO: 814417 - RNA, 20 nt, Artificial Sequence
  Synthetic
uuccaacucuuauccaucau

SEQ ID NO: 814418 - RNA, 20 nt, Artificial Sequence
  Synthetic
cuuuguuugaaaagcaucau

SEQ ID NO: 814419 - RNA, 20 nt, Artificial Sequence
  Synthetic
uuuagauaugggagcaucau

SEQ ID NO: 814420 - RNA, 20 nt, Artificial Sequence
  Synthetic
aacauuugaaaaaucaucau

SEQ ID NO: 814421 - RNA, 20 nt, Artificial Sequence
  Synthetic
cugccaacagugaucaucau

SEQ ID NO: 814422 - RNA, 20 nt, Artificial Sequence
  Synthetic
cugaaguuaucccucaucau

SEQ ID NO: 814423 - RNA, 20 nt, Artificial Sequence
  Synthetic
aggcugaccucugucaucau

SEQ ID NO: 814424 - RNA, 20 nt, Artificial Sequence
  Synthetic
aagagcuguuuauucaucau

SEQ ID NO: 814425 - RNA, 20 nt, Artificial Sequence
  Synthetic
aaaagacaagcuuucaucau

SEQ ID NO: 814426 - RNA, 20 nt, Artificial Sequence
  Synthetic
uuacacagcuaauagaucau

SEQ ID NO: 814427 - RNA, 20 nt, Artificial Sequence
  Synthetic
aaauaauagaccuagaucau

SEQ ID NO: 814428 - RNA, 20 nt, Artificial Sequence
  Synthetic
uauguacuucauaggaucau

SEQ ID NO: 814429 - RNA, 20 nt, Artificial Sequence
  Synthetic
uuccaaagugcuaggaucau

SEQ ID NO: 814430 - RNA, 20 nt, Artificial Sequence
  Synthetic
agagggugcugugggaucau

SEQ ID NO: 814431 - RNA, 20 nt, Artificial Sequence
  Synthetic
aauguaguggaauggaucau

SEQ ID NO: 814432 - RNA, 20 nt, Artificial Sequence
  Synthetic
cagugggauugcuggaucau

SEQ ID NO: 814433 - RNA, 20 nt, Artificial Sequence
  Synthetic
agcucaacaucacugaucau

SEQ ID NO: 814434 - RNA, 20 nt, Artificial Sequence
  Synthetic
cacuuaugauaccugaucau

SEQ ID NO: 814435 - RNA, 20 nt, Artificial Sequence
  Synthetic
ucuuucuccuaaaauaucau

SEQ ID NO: 814436 - RNA, 20 nt, Artificial Sequence
  Synthetic
auaaaauauguuaauaucau

SEQ ID NO: 814437 - RNA, 20 nt, Artificial Sequence
  Synthetic
acacagccaaaccauaucau

SEQ ID NO: 814438 - RNA, 20 nt, Artificial Sequence
  Synthetic
uggcauaaaauucauaucau

SEQ ID NO: 814439 - RNA, 20 nt, Artificial Sequence
  Synthetic
agguaacacuuguauaucau

SEQ ID NO: 814440 - RNA, 20 nt, Artificial Sequence
  Synthetic
ugcaaauaaaaaccuaucau

SEQ ID NO: 814441 - RNA, 20 nt, Artificial Sequence
  Synthetic
uuuauauguuuugcuaucau

SEQ ID NO: 814442 - RNA, 20 nt, Artificial Sequence
  Synthetic
cauaggagcauucuuaucau

SEQ ID NO: 814443 - RNA, 20 nt, Artificial Sequence
  Synthetic
auagguuaauggguuaucau

SEQ ID NO: 814444 - RNA, 20 nt, Artificial Sequence
  Synthetic
uucagcagcaacuuuaucau

SEQ ID NO: 814445 - RNA, 20 nt, Artificial Sequence
  Synthetic
ugacagaggaaguuuaucau

SEQ ID NO: 814446 - RNA, 20 nt, Artificial Sequence
  Synthetic
acucagcaguaguuuaucau

SEQ ID NO: 814447 - RNA, 20 nt, Artificial Sequence
  Synthetic
ugucuuuucucuuuuaucau

SEQ ID NO: 814448 - RNA, 20 nt, Artificial Sequence
  Synthetic
uugagggggacaaaacucau

SEQ ID NO: 814449 - RNA, 20 nt, Artificial Sequence
  Synthetic
aaacucagggcaaaacucau

SEQ ID NO: 814450 - RNA, 20 nt, Artificial Sequence
  Synthetic
caucagugcugaaaacucau

SEQ ID NO: 814451 - RNA, 20 nt, Artificial Sequence
  Synthetic
uggcaguagaacaaacucau

SEQ ID NO: 814452 - RNA, 20 nt, Artificial Sequence
  Synthetic
aaugacuugccccaacucau

SEQ ID NO: 814453 - RNA, 20 nt, Artificial Sequence
  Synthetic
cacuauauauaauaacucau

SEQ ID NO: 814454 - RNA, 20 nt, Artificial Sequence
  Synthetic
uaaguaacuucuuaacucau

SEQ ID NO: 814455 - RNA, 20 nt, Artificial Sequence
  Synthetic
cauuuucuuuauccacucau

SEQ ID NO: 814456 - RNA, 20 nt, Artificial Sequence
  Synthetic
aaaaaaaaaaaaucacucau

SEQ ID NO: 814457 - RNA, 20 nt, Artificial Sequence
  Synthetic
aaucauuuauuaucacucau

SEQ ID NO: 814458 - RNA, 20 nt, Artificial Sequence
  Synthetic
caccgcauguccucacucau

SEQ ID NO: 814459 - RNA, 20 nt, Artificial Sequence
  Synthetic
caccgcauauucucacucau

SEQ ID NO: 814460 - RNA, 20 nt, Artificial Sequence
  Synthetic
cacugcauauucucacucau

SEQ ID NO: 814461 - RNA, 20 nt, Artificial Sequence
  Synthetic
caccgcauguucucacucau

SEQ ID NO: 814462 - RNA, 20 nt, Artificial Sequence
  Synthetic
uuggguauuuauugacucau

SEQ ID NO: 814463 - RNA, 20 nt, Artificial Sequence
  Synthetic
ccucucagacagcaccucau

SEQ ID NO: 814464 - RNA, 20 nt, Artificial Sequence
  Synthetic
caccauagacuugaccucau

SEQ ID NO: 814465 - RNA, 20 nt, Artificial Sequence
  Synthetic
ugugagccaccgcgccucau

SEQ ID NO: 814466 - RNA, 20 nt, Artificial Sequence
  Synthetic
ucuccaacuacuggccucau

SEQ ID NO: 814467 - RNA, 20 nt, Artificial Sequence
  Synthetic
agauuuaauuacugccucau

SEQ ID NO: 814468 - RNA, 20 nt, Artificial Sequence
  Synthetic
acaguaaaaaccugccucau

SEQ ID NO: 814469 - RNA, 20 nt, Artificial Sequence
  Synthetic
agcagauauaucauccucau

SEQ ID NO: 814470 - RNA, 20 nt, Artificial Sequence
  Synthetic
aaacaaaaugugaagcucau

SEQ ID NO: 814471 - RNA, 20 nt, Artificial Sequence
  Synthetic
uaaauuucuagugagcucau

SEQ ID NO: 814472 - RNA, 20 nt, Artificial Sequence
  Synthetic
caccgcauguucucgcucau

SEQ ID NO: 814473 - RNA, 20 nt, Artificial Sequence
  Synthetic
uuuuggauuuucaggcucau

SEQ ID NO: 814474 - RNA, 20 nt, Artificial Sequence
  Synthetic
uucucaaaguaaaugcucau

SEQ ID NO: 814475 - RNA, 20 nt, Artificial Sequence
  Synthetic
cagcuccauuguaaucucau

SEQ ID NO: 814476 - RNA, 20 nt, Artificial Sequence
  Synthetic
uuuacuagagcacaucucau

SEQ ID NO: 814477 - RNA, 20 nt, Artificial Sequence
  Synthetic
ucaugaaacuaucaucucau

SEQ ID NO: 814478 - RNA, 20 nt, Artificial Sequence
  Synthetic
aaaaaaauaaaauaucucau

SEQ ID NO: 814479 - RNA, 20 nt, Artificial Sequence
  Synthetic
cucacuuauaacuaucucau

SEQ ID NO: 814480 - RNA, 20 nt, Artificial Sequence
  Synthetic
caauuacaugauacucucau

SEQ ID NO: 814481 - RNA, 20 nt, Artificial Sequence
  Synthetic
uaaauggcaucaucucucau

SEQ ID NO: 814482 - RNA, 20 nt, Artificial Sequence
  Synthetic
aucuaauaaucgucucucau

SEQ ID NO: 814483 - RNA, 20 nt, Artificial Sequence
  Synthetic
aagcuaccaucgucucucau

SEQ ID NO: 814484 - RNA, 20 nt, Artificial Sequence
  Synthetic
ugaaaacagauacgucucau

SEQ ID NO: 814485 - RNA, 20 nt, Artificial Sequence
  Synthetic
caacugugacccauucucau

SEQ ID NO: 814486 - RNA, 20 nt, Artificial Sequence
  Synthetic
cagcgguauuagauucucau

SEQ ID NO: 814487 - RNA, 20 nt, Artificial Sequence
  Synthetic
cguuguguauuuauucucau

SEQ ID NO: 814488 - RNA, 20 nt, Artificial Sequence
  Synthetic
uaaauuuuuucucuucucau

SEQ ID NO: 814489 - RNA, 20 nt, Artificial Sequence
  Synthetic
uauagaacaugucuucucau

SEQ ID NO: 814490 - RNA, 20 nt, Artificial Sequence
  Synthetic
aauucugugaagaaagucau

SEQ ID NO: 814491 - RNA, 20 nt, Artificial Sequence
  Synthetic
auucaggccugugaagucau

SEQ ID NO: 814492 - RNA, 20 nt, Artificial Sequence
  Synthetic
auaaauaauguggcagucau

SEQ ID NO: 814493 - RNA, 20 nt, Artificial Sequence
  Synthetic
uauuucacuauugcagucau

SEQ ID NO: 814494 - RNA, 20 nt, Artificial Sequence
  Synthetic
cuccugcauuaaucagucau

SEQ ID NO: 814495 - RNA, 20 nt, Artificial Sequence
  Synthetic
aaucccguggauucagucau

SEQ ID NO: 814496 - RNA, 20 nt, Artificial Sequence
  Synthetic
uuaugaugugacagagucau

SEQ ID NO: 814497 - RNA, 20 nt, Artificial Sequence
  Synthetic
uuuaaacgugccagagucau

SEQ ID NO: 814498 - RNA, 20 nt, Artificial Sequence
  Synthetic
aaaugcaagugcagagucau

SEQ ID NO: 814499 - RNA, 20 nt, Artificial Sequence
  Synthetic
auuaugagaaguugagucau

SEQ ID NO: 814500 - RNA, 20 nt, Artificial Sequence
  Synthetic
aaguugacccucauagucau

SEQ ID NO: 814501 - RNA, 20 nt, Artificial Sequence
  Synthetic
cauagagaauugauagucau

SEQ ID NO: 814502 - RNA, 20 nt, Artificial Sequence
  Synthetic
cacaaaauccugcuagucau

SEQ ID NO: 814503 - RNA, 20 nt, Artificial Sequence
  Synthetic
uaaaauaauuuuuuagucau

SEQ ID NO: 814504 - RNA, 20 nt, Artificial Sequence
  Synthetic
ucagacaagaaagucgucau

SEQ ID NO: 814505 - RNA, 20 nt, Artificial Sequence
  Synthetic
uaguaguauugucaggucau

SEQ ID NO: 814506 - RNA, 20 nt, Artificial Sequence
  Synthetic
uaaggguuagaugaggucau

SEQ ID NO: 814507 - RNA, 20 nt, Artificial Sequence
  Synthetic
aauggggcaauguaggucau

SEQ ID NO: 814508 - RNA, 20 nt, Artificial Sequence
  Synthetic
aacgggaaguguggggucau

SEQ ID NO: 814509 - RNA, 20 nt, Artificial Sequence
  Synthetic
ugucaaaaauuuggggucau

SEQ ID NO: 814510 - RNA, 20 nt, Artificial Sequence
  Synthetic
uucuggucucucguggucau

SEQ ID NO: 814511 - RNA, 20 nt, Artificial Sequence
  Synthetic
uguaucauauauuuggucau

SEQ ID NO: 814512 - RNA, 20 nt, Artificial Sequence
  Synthetic
caugugguuuuuuuggucau

SEQ ID NO: 814513 - RNA, 20 nt, Artificial Sequence
  Synthetic
aaucucccaggcaaugucau

SEQ ID NO: 814514 - RNA, 20 nt, Artificial Sequence
  Synthetic
ucaaaugauaagaaugucau

SEQ ID NO: 814515 - RNA, 20 nt, Artificial Sequence
  Synthetic
auggaaguaucuaaugucau

SEQ ID NO: 814516 - RNA, 20 nt, Artificial Sequence
  Synthetic
auggguaaauugcaugucau

SEQ ID NO: 814517 - RNA, 20 nt, Artificial Sequence
  Synthetic
uauagguaaacucaugucau

SEQ ID NO: 814518 - RNA, 20 nt, Artificial Sequence
  Synthetic
ccauaauccccagaugucau

SEQ ID NO: 814519 - RNA, 20 nt, Artificial Sequence
  Synthetic
uuuuuuuuuauaacugucau

SEQ ID NO: 814520 - RNA, 20 nt, Artificial Sequence
  Synthetic
uauuaauguacugcugucau

SEQ ID NO: 814521 - RNA, 20 nt, Artificial Sequence
  Synthetic
cauuccugggagucugucau

SEQ ID NO: 814522 - RNA, 20 nt, Artificial Sequence
  Synthetic
ccaaaauccccaggugucau

SEQ ID NO: 814523 - RNA, 20 nt, Artificial Sequence
  Synthetic
aacuuacauacaugugucau

SEQ ID NO: 814524 - RNA, 20 nt, Artificial Sequence
  Synthetic
ccauaauccccaugugucau

SEQ ID NO: 814525 - RNA, 20 nt, Artificial Sequence
  Synthetic
agauaggauauaugugucau

SEQ ID NO: 814526 - RNA, 20 nt, Artificial Sequence
  Synthetic
auuuguuuuaauugugucau

SEQ ID NO: 814527 - RNA, 20 nt, Artificial Sequence
  Synthetic
cauagguaaacuugugucau

SEQ ID NO: 814528 - RNA, 20 nt, Artificial Sequence
  Synthetic
augagcaguucuugugucau

SEQ ID NO: 814529 - RNA, 20 nt, Artificial Sequence
  Synthetic
agaugaacuguaauugucau

SEQ ID NO: 814530 - RNA, 20 nt, Artificial Sequence
  Synthetic
uaauugaacauucuugucau

SEQ ID NO: 814531 - RNA, 20 nt, Artificial Sequence
  Synthetic
uuucauuucacauuugucau

SEQ ID NO: 814532 - RNA, 20 nt, Artificial Sequence
  Synthetic
uaaaauguaguuuuugucau

SEQ ID NO: 814533 - RNA, 20 nt, Artificial Sequence
  Synthetic
aaucaugugguuuuugucau

SEQ ID NO: 814534 - RNA, 20 nt, Artificial Sequence
  Synthetic
ucuauuauacuaaaauucau

SEQ ID NO: 814535 - RNA, 20 nt, Artificial Sequence
  Synthetic
aaacaggaauacaaauucau

SEQ ID NO: 814536 - RNA, 20 nt, Artificial Sequence
  Synthetic
ucugucucuaauaaauucau

SEQ ID NO: 814537 - RNA, 20 nt, Artificial Sequence
  Synthetic
cacauuagaauacaauucau

SEQ ID NO: 814538 - RNA, 20 nt, Artificial Sequence
  Synthetic
auauguuugguagaauucau

SEQ ID NO: 814539 - RNA, 20 nt, Artificial Sequence
  Synthetic
acccuguuaaaguaauucau

SEQ ID NO: 814540 - RNA, 20 nt, Artificial Sequence
  Synthetic
agccaccugaaguaauucau

SEQ ID NO: 814541 - RNA, 20 nt, Artificial Sequence
  Synthetic
auuaaggauauguaauucau

SEQ ID NO: 814542 - RNA, 20 nt, Artificial Sequence
  Synthetic
ucaaagauaucuuaauucau

SEQ ID NO: 814543 - RNA, 20 nt, Artificial Sequence
  Synthetic
aaaagcagaguuuaauucau

SEQ ID NO: 814544 - RNA, 20 nt, Artificial Sequence
  Synthetic
cauuuucuuuauccauucau

SEQ ID NO: 814545 - RNA, 20 nt, Artificial Sequence
  Synthetic
aaaaagcauauuccauucau

SEQ ID NO: 814546 - RNA, 20 nt, Artificial Sequence
  Synthetic
caccgcauauucucauucau

SEQ ID NO: 814547 - RNA, 20 nt, Artificial Sequence
  Synthetic
uuaccauuugcuucauucau

SEQ ID NO: 814548 - RNA, 20 nt, Artificial Sequence
  Synthetic
ucacugaacaauagauucau

SEQ ID NO: 814549 - RNA, 20 nt, Artificial Sequence
  Synthetic
ucacuggacaauagauucau

SEQ ID NO: 814550 - RNA, 20 nt, Artificial Sequence
  Synthetic
agaccagcuccuggauucau

SEQ ID NO: 814551 - RNA, 20 nt, Artificial Sequence
  Synthetic
caaguuuccaagugauucau

SEQ ID NO: 814552 - RNA, 20 nt, Artificial Sequence
  Synthetic
agacaaguuaacauauucau

SEQ ID NO: 814553 - RNA, 20 nt, Artificial Sequence
  Synthetic
uaaacuuacgauauauucau

SEQ ID NO: 814554 - RNA, 20 nt, Artificial Sequence
  Synthetic
uaucuauauauacuauucau

SEQ ID NO: 814555 - RNA, 20 nt, Artificial Sequence
  Synthetic
agaauuuucacccuauucau

SEQ ID NO: 814556 - RNA, 20 nt, Artificial Sequence
  Synthetic
ugaaaaaauauaguauucau

SEQ ID NO: 814557 - RNA, 20 nt, Artificial Sequence
  Synthetic
uaauaacaagauuuauucau

SEQ ID NO: 814558 - RNA, 20 nt, Artificial Sequence
  Synthetic
aaaugauuaagcaacuucau

SEQ ID NO: 814559 - RNA, 20 nt, Artificial Sequence
  Synthetic
auugaaauuggugacuucau

SEQ ID NO: 814560 - RNA, 20 nt, Artificial Sequence
  Synthetic
agggucacugguuacuucau

SEQ ID NO: 814561 - RNA, 20 nt, Artificial Sequence
  Synthetic
aauaauucucuuuacuucau

SEQ ID NO: 814562 - RNA, 20 nt, Artificial Sequence
  Synthetic
auguucauaaguaccuucau

SEQ ID NO: 814563 - RNA, 20 nt, Artificial Sequence
  Synthetic
auacugaauauauccuucau

SEQ ID NO: 814564 - RNA, 20 nt, Artificial Sequence
  Synthetic
uaggacuuuauaagcuucau

SEQ ID NO: 814565 - RNA, 20 nt, Artificial Sequence
  Synthetic
uauuuccacuuacgcuucau

SEQ ID NO: 814566 - RNA, 20 nt, Artificial Sequence
  Synthetic
ucaagaccagauggcuucau

SEQ ID NO: 814567 - RNA, 20 nt, Artificial Sequence
  Synthetic
cugagaugugcuggcuucau

SEQ ID NO: 814568 - RNA, 20 nt, Artificial Sequence
  Synthetic
aaugauagcaccugcuucau

SEQ ID NO: 814569 - RNA, 20 nt, Artificial Sequence
  Synthetic
uuguuuccugggugcuucau

SEQ ID NO: 814570 - RNA, 20 nt, Artificial Sequence
  Synthetic
uuggaugauuacaucuucau

SEQ ID NO: 814571 - RNA, 20 nt, Artificial Sequence
  Synthetic
uuucaucucuucaucuucau

SEQ ID NO: 814572 - RNA, 20 nt, Artificial Sequence
  Synthetic
ccccacuggaaggucuucau

SEQ ID NO: 814573 - RNA, 20 nt, Artificial Sequence
  Synthetic
aaggucucuggauucuucau

SEQ ID NO: 814574 - RNA, 20 nt, Artificial Sequence
  Synthetic
uggaccaaaauauucuucau

SEQ ID NO: 814575 - RNA, 20 nt, Artificial Sequence
  Synthetic
acugauuuuagcuucuucau

SEQ ID NO: 814576 - RNA, 20 nt, Artificial Sequence
  Synthetic
agacauuuuaauuucuucau

SEQ ID NO: 814577 - RNA, 20 nt, Artificial Sequence
  Synthetic
aguugaggcaguuucuucau

SEQ ID NO: 814578 - RNA, 20 nt, Artificial Sequence
  Synthetic
uauacagagauuuucuucau

SEQ ID NO: 814579 - RNA, 20 nt, Artificial Sequence
  Synthetic
ugauuucagguuuucuucau

SEQ ID NO: 814580 - RNA, 20 nt, Artificial Sequence
  Synthetic
auaauuuuccuucaguucau

SEQ ID NO: 814581 - RNA, 20 nt, Artificial Sequence
  Synthetic
agggccucgauuucguucau

SEQ ID NO: 814582 - RNA, 20 nt, Artificial Sequence
  Synthetic
aaccuaaaugacggguucau

SEQ ID NO: 814583 - RNA, 20 nt, Artificial Sequence
  Synthetic
agugccacucaaugguucau

SEQ ID NO: 814584 - RNA, 20 nt, Artificial Sequence
  Synthetic
auuacaaaagaaauguucau

SEQ ID NO: 814585 - RNA, 20 nt, Artificial Sequence
  Synthetic
uuccuaaaagcaauguucau

SEQ ID NO: 814586 - RNA, 20 nt, Artificial Sequence
  Synthetic
aauguccucuaaguguucau

SEQ ID NO: 814587 - RNA, 20 nt, Artificial Sequence
  Synthetic
uauccaccauuauuguucau

SEQ ID NO: 814588 - RNA, 20 nt, Artificial Sequence
  Synthetic
aguuggagguggaauuucau

SEQ ID NO: 814589 - RNA, 20 nt, Artificial Sequence
  Synthetic
cgugcuuccuuuaauuucau

SEQ ID NO: 814590 - RNA, 20 nt, Artificial Sequence
  Synthetic
ucaaugugguuacauuucau

SEQ ID NO: 814591 - RNA, 20 nt, Artificial Sequence
  Synthetic
uguuuaacuuccuauuucau

SEQ ID NO: 814592 - RNA, 20 nt, Artificial Sequence
  Synthetic
caggucaaaugguauuucau

SEQ ID NO: 814593 - RNA, 20 nt, Artificial Sequence
  Synthetic
uuacggacauuguauuucau

SEQ ID NO: 814594 - RNA, 20 nt, Artificial Sequence
  Synthetic
ccaacuuauguuuauuucau

SEQ ID NO: 814595 - RNA, 20 nt, Artificial Sequence
  Synthetic
caagaauuugcaacuuucau

SEQ ID NO: 814596 - RNA, 20 nt, Artificial Sequence
  Synthetic
uucacuuucagaacuuucau

SEQ ID NO: 814597 - RNA, 20 nt, Artificial Sequence
  Synthetic
ccacugagagccacuuucau

SEQ ID NO: 814598 - RNA, 20 nt, Artificial Sequence
  Synthetic
ucugggccugagccuuucau

SEQ ID NO: 814599 - RNA, 20 nt, Artificial Sequence
  Synthetic
aauacaguuucaaguuucau

SEQ ID NO: 814600 - RNA, 20 nt, Artificial Sequence
  Synthetic
uaugggcaugucaguuucau

SEQ ID NO: 814601 - RNA, 20 nt, Artificial Sequence
  Synthetic
cuaagacaagaacguuucau

SEQ ID NO: 814602 - RNA, 20 nt, Artificial Sequence
  Synthetic
uuaauugguauggguuucau

SEQ ID NO: 814603 - RNA, 20 nt, Artificial Sequence
  Synthetic
acuuuacuucuguguuucau

SEQ ID NO: 814604 - RNA, 20 nt, Artificial Sequence
  Synthetic
aaauccuagaguuguuucau

SEQ ID NO: 814605 - RNA, 20 nt, Artificial Sequence
  Synthetic
aaaagaaaauagauuuucau

SEQ ID NO: 814606 - RNA, 20 nt, Artificial Sequence
  Synthetic
auguaggaucuccuuuucau

SEQ ID NO: 814607 - RNA, 20 nt, Artificial Sequence
  Synthetic
aucuguaguuuucuuuucau

SEQ ID NO: 814608 - RNA, 20 nt, Artificial Sequence
  Synthetic
uacuguccuuacuuuuucau

SEQ ID NO: 814609 - RNA, 20 nt, Artificial Sequence
  Synthetic
auuuaacuugauuuuuucau

SEQ ID NO: 814610 - RNA, 20 nt, Artificial Sequence
  Synthetic
uuuuuccuggaaaaaaagau

SEQ ID NO: 814611 - RNA, 20 nt, Artificial Sequence
  Synthetic
auguuugucuacaaaaagau

SEQ ID NO: 814612 - RNA, 20 nt, Artificial Sequence
  Synthetic
cauuagcguauuaaaaagau

SEQ ID NO: 814613 - RNA, 20 nt, Artificial Sequence
  Synthetic
ugggguuugugacaaaagau

SEQ ID NO: 814614 - RNA, 20 nt, Artificial Sequence
  Synthetic
ugugauuauaggcaaaagau

SEQ ID NO: 814615 - RNA, 20 nt, Artificial Sequence
  Synthetic
caaauuccuggagaaaagau

SEQ ID NO: 814616 - RNA, 20 nt, Artificial Sequence
  Synthetic
auaagaaaaacauaaaagau

SEQ ID NO: 814617 - RNA, 20 nt, Artificial Sequence
  Synthetic
ugcuaauaauuauaaaagau

SEQ ID NO: 814618 - RNA, 20 nt, Artificial Sequence
  Synthetic
aaaaagaugggcuaaaagau

SEQ ID NO: 814619 - RNA, 20 nt, Artificial Sequence
  Synthetic
auuucaaaagguuaaaagau

SEQ ID NO: 814620 - RNA, 20 nt, Artificial Sequence
  Synthetic
ucaggaaagacaacaaagau

SEQ ID NO: 814621 - RNA, 20 nt, Artificial Sequence
  Synthetic
auguaaccaaccacaaagau

SEQ ID NO: 814622 - RNA, 20 nt, Artificial Sequence
  Synthetic
auaacaauuacuacaaagau

SEQ ID NO: 814623 - RNA, 20 nt, Artificial Sequence
  Synthetic
agcaggagggaagcaaagau

SEQ ID NO: 814624 - RNA, 20 nt, Artificial Sequence
  Synthetic
aaugaccuuugagcaaagau

SEQ ID NO: 814625 - RNA, 20 nt, Artificial Sequence
  Synthetic
caacaguuacuggcaaagau

SEQ ID NO: 814626 - RNA, 20 nt, Artificial Sequence
  Synthetic
agugaauacaauucaaagau

SEQ ID NO: 814627 - RNA, 20 nt, Artificial Sequence
  Synthetic
uuuuuccauuaaagaaagau

SEQ ID NO: 814628 - RNA, 20 nt, Artificial Sequence
  Synthetic
uugugggcuggcagaaagau

SEQ ID NO: 814629 - RNA, 20 nt, Artificial Sequence
  Synthetic
aaugcuggacucagaaagau

SEQ ID NO: 814630 - RNA, 20 nt, Artificial Sequence
  Synthetic
cccagguccaggagaaagau

SEQ ID NO: 814631 - RNA, 20 nt, Artificial Sequence
  Synthetic
uuucuauuuggaggaaagau

SEQ ID NO: 814632 - RNA, 20 nt, Artificial Sequence
  Synthetic
agccugagcaacggaaagau

SEQ ID NO: 814633 - RNA, 20 nt, Artificial Sequence
  Synthetic
ugcuuacugaguggaaagau

SEQ ID NO: 814634 - RNA, 20 nt, Artificial Sequence
  Synthetic
aaaaacaggguuggaaagau

SEQ ID NO: 814635 - RNA, 20 nt, Artificial Sequence
  Synthetic
aaaaacuugaagugaaagau

SEQ ID NO: 814636 - RNA, 20 nt, Artificial Sequence
  Synthetic
agagauuuucuuugaaagau

SEQ ID NO: 814637 - RNA, 20 nt, Artificial Sequence
  Synthetic
auagcagcuuuaauaaagau

SEQ ID NO: 814638 - RNA, 20 nt, Artificial Sequence
  Synthetic
uccaaagcuacucuaaagau

SEQ ID NO: 814639 - RNA, 20 nt, Artificial Sequence
  Synthetic
ucaucuagaauaguaaagau

SEQ ID NO: 814640 - RNA, 20 nt, Artificial Sequence
  Synthetic
uugguuuuggguguaaagau

SEQ ID NO: 814641 - RNA, 20 nt, Artificial Sequence
  Synthetic
acacaaaaguuuuuaaagau

SEQ ID NO: 814642 - RNA, 20 nt, Artificial Sequence
  Synthetic
caaaagcaacaaaacaagau

SEQ ID NO: 814643 - RNA, 20 nt, Artificial Sequence
  Synthetic
aaacaaaggcaaaacaagau

SEQ ID NO: 814644 - RNA, 20 nt, Artificial Sequence
  Synthetic
aaaagagaaacuaacaagau

SEQ ID NO: 814645 - RNA, 20 nt, Artificial Sequence
  Synthetic
aguugcuuuuauuacaagau

SEQ ID NO: 814646 - RNA, 20 nt, Artificial Sequence
  Synthetic
ccaccaugccuggccaagau

SEQ ID NO: 814647 - RNA, 20 nt, Artificial Sequence
  Synthetic
agggaacugguguccaagau

SEQ ID NO: 814648 - RNA, 20 nt, Artificial Sequence
  Synthetic
ugaaauacucccagcaagau

SEQ ID NO: 814649 - RNA, 20 nt, Artificial Sequence
  Synthetic
auuccagggagcugcaagau

SEQ ID NO: 814650 - RNA, 20 nt, Artificial Sequence
  Synthetic
ccuuuagaggacgucaagau

SEQ ID NO: 814651 - RNA, 20 nt, Artificial Sequence
  Synthetic
uuuucuuuuauggucaagau

SEQ ID NO: 814652 - RNA, 20 nt, Artificial Sequence
  Synthetic
cagcuaugcagugucaagau

SEQ ID NO: 814653 - RNA, 20 nt, Artificial Sequence
  Synthetic
uuacaacaagucuucaagau

SEQ ID NO: 814654 - RNA, 20 nt, Artificial Sequence
  Synthetic
caaauuccugcuuucaagau

SEQ ID NO: 814655 - RNA, 20 nt, Artificial Sequence
  Synthetic
ugccuacacagaaagaagau

SEQ ID NO: 814656 - RNA, 20 nt, Artificial Sequence
  Synthetic
ucuggcuuagagaagaagau

SEQ ID NO: 814657 - RNA, 20 nt, Artificial Sequence
  Synthetic
agagguacagagcagaagau

SEQ ID NO: 814658 - RNA, 20 nt, Artificial Sequence
  Synthetic
uuucuuauucaucagaagau

SEQ ID NO: 814659 - RNA, 20 nt, Artificial Sequence
  Synthetic
ccucagccuucugagaagau

SEQ ID NO: 814660 - RNA, 20 nt, Artificial Sequence
  Synthetic
aacucuuccaaagggaagau

SEQ ID NO: 814661 - RNA, 20 nt, Artificial Sequence
  Synthetic
aguaaaaguuucgggaagau

SEQ ID NO: 814662 - RNA, 20 nt, Artificial Sequence
  Synthetic
uccuuccaacaugggaagau

SEQ ID NO: 814663 - RNA, 20 nt, Artificial Sequence
  Synthetic
auaaacacaggugggaagau

SEQ ID NO: 814664 - RNA, 20 nt, Artificial Sequence
  Synthetic
acugcuguaacuuggaagau

SEQ ID NO: 814665 - RNA, 20 nt, Artificial Sequence
  Synthetic
ccauacugaucaaugaagau

SEQ ID NO: 814666 - RNA, 20 nt, Artificial Sequence
  Synthetic
aauaccuacugcaugaagau

SEQ ID NO: 814667 - RNA, 20 nt, Artificial Sequence
  Synthetic
uuucaaaaaaucaugaagau

SEQ ID NO: 814668 - RNA, 20 nt, Artificial Sequence
  Synthetic
acaggauucuugcugaagau

SEQ ID NO: 814669 - RNA, 20 nt, Artificial Sequence
  Synthetic
uuauauucauuucugaagau

SEQ ID NO: 814670 - RNA, 20 nt, Artificial Sequence
  Synthetic
uuucuucuuuuauugaagau

SEQ ID NO: 814671 - RNA, 20 nt, Artificial Sequence
  Synthetic
cuugauaagucuuugaagau

SEQ ID NO: 814672 - RNA, 20 nt, Artificial Sequence
  Synthetic
agugacuuggaagauaagau

SEQ ID NO: 814673 - RNA, 20 nt, Artificial Sequence
  Synthetic
ucauagcaauccuauaagau

SEQ ID NO: 814674 - RNA, 20 nt, Artificial Sequence
  Synthetic
ugaagaauguucuauaagau

SEQ ID NO: 814675 - RNA, 20 nt, Artificial Sequence
  Synthetic
agauaaggcaaaacuaagau

SEQ ID NO: 814676 - RNA, 20 nt, Artificial Sequence
  Synthetic
cuucuuaaacucccuaagau

SEQ ID NO: 814677 - RNA, 20 nt, Artificial Sequence
  Synthetic
auaucuauaauagcuaagau

SEQ ID NO: 814678 - RNA, 20 nt, Artificial Sequence
  Synthetic
cauguucaacaagguaagau

SEQ ID NO: 814679 - RNA, 20 nt, Artificial Sequence
  Synthetic
caauuagccuaugguaagau

SEQ ID NO: 814680 - RNA, 20 nt, Artificial Sequence
  Synthetic
uccuuacucaguuguaagau

SEQ ID NO: 814681 - RNA, 20 nt, Artificial Sequence
  Synthetic
cauguguaagguuguaagau

SEQ ID NO: 814682 - RNA, 20 nt, Artificial Sequence
  Synthetic
aagucagaaaugauuaagau

SEQ ID NO: 814683 - RNA, 20 nt, Artificial Sequence
  Synthetic
aagggaguggugguuaagau

SEQ ID NO: 814684 - RNA, 20 nt, Artificial Sequence
  Synthetic
uaugaagcuugguuuaagau

SEQ ID NO: 814685 - RNA, 20 nt, Artificial Sequence
  Synthetic
uuaaagaaugaagaacagau

SEQ ID NO: 814686 - RNA, 20 nt, Artificial Sequence
  Synthetic
agagucaucagagaacagau

SEQ ID NO: 814687 - RNA, 20 nt, Artificial Sequence
  Synthetic
uaaagagacaacccacagau

SEQ ID NO: 814688 - RNA, 20 nt, Artificial Sequence
  Synthetic
ucucaaaaaauuucacagau

SEQ ID NO: 814689 - RNA, 20 nt, Artificial Sequence
  Synthetic
ugggucaggaaaagacagau

SEQ ID NO: 814690 - RNA, 20 nt, Artificial Sequence
  Synthetic
acucacauacaaauacagau

SEQ ID NO: 814691 - RNA, 20 nt, Artificial Sequence
  Synthetic
ugaacaggcaaacuacagau

SEQ ID NO: 814692 - RNA, 20 nt, Artificial Sequence
  Synthetic
agagagaaaccuguacagau

SEQ ID NO: 814693 - RNA, 20 nt, Artificial Sequence
  Synthetic
uuuuacauucaguuacagau

SEQ ID NO: 814694 - RNA, 20 nt, Artificial Sequence
  Synthetic
ucucccaucaccccccagau

SEQ ID NO: 814695 - RNA, 20 nt, Artificial Sequence
  Synthetic
agacagguagacagccagau

SEQ ID NO: 814696 - RNA, 20 nt, Artificial Sequence
  Synthetic
uauuaucaucuuguccagau

SEQ ID NO: 814697 - RNA, 20 nt, Artificial Sequence
  Synthetic
uaaauacacccauuccagau

SEQ ID NO: 814698 - RNA, 20 nt, Artificial Sequence
  Synthetic
ucccacucuuauuuccagau

SEQ ID NO: 814699 - RNA, 20 nt, Artificial Sequence
  Synthetic
ccaguaagaccuuuccagau

SEQ ID NO: 814700 - RNA, 20 nt, Artificial Sequence
  Synthetic
aauugucaaggaaagcagau

SEQ ID NO: 814701 - RNA, 20 nt, Artificial Sequence
  Synthetic
ucuucuauauuaaagcagau

SEQ ID NO: 814702 - RNA, 20 nt, Artificial Sequence
  Synthetic
ugaguuauuaauaagcagau

SEQ ID NO: 814703 - RNA, 20 nt, Artificial Sequence
  Synthetic
aaccauuaucaggagcagau

SEQ ID NO: 814704 - RNA, 20 nt, Artificial Sequence
  Synthetic
aacugucaaguauagcagau

SEQ ID NO: 814705 - RNA, 20 nt, Artificial Sequence
  Synthetic
ccaacagaagacuagcagau

SEQ ID NO: 814706 - RNA, 20 nt, Artificial Sequence
  Synthetic
aucugguagggguagcagau

SEQ ID NO: 814707 - RNA, 20 nt, Artificial Sequence
  Synthetic
aaugagaaagucaggcagau

SEQ ID NO: 814708 - RNA, 20 nt, Artificial Sequence
  Synthetic
aucuuugcuuuuaggcagau

SEQ ID NO: 814709 - RNA, 20 nt, Artificial Sequence
  Synthetic
ugauaacucuagcggcagau

SEQ ID NO: 814710 - RNA, 20 nt, Artificial Sequence
  Synthetic
aacuuacaaucauggcagau

SEQ ID NO: 814711 - RNA, 20 nt, Artificial Sequence
  Synthetic
uggaagagaaauaugcagau

SEQ ID NO: 814712 - RNA, 20 nt, Artificial Sequence
  Synthetic
uuuagcacuuauuugcagau

SEQ ID NO: 814713 - RNA, 20 nt, Artificial Sequence
  Synthetic
cagguaaucguaaaucagau

SEQ ID NO: 814714 - RNA, 20 nt, Artificial Sequence
  Synthetic
uaugcugucacagaucagau

SEQ ID NO: 814715 - RNA, 20 nt, Artificial Sequence
  Synthetic
ugguaggagguugaucagau

SEQ ID NO: 814716 - RNA, 20 nt, Artificial Sequence
  Synthetic
ucaagcuacaggacucagau

SEQ ID NO: 814717 - RNA, 20 nt, Artificial Sequence
  Synthetic
cgacucuuccugacucagau

SEQ ID NO: 814718 - RNA, 20 nt, Artificial Sequence
  Synthetic
aauuuuuuuuaaucucagau

SEQ ID NO: 814719 - RNA, 20 nt, Artificial Sequence
  Synthetic
aauauacacauaucucagau

SEQ ID NO: 814720 - RNA, 20 nt, Artificial Sequence
  Synthetic
acagaaaaacacagucagau

SEQ ID NO: 814721 - RNA, 20 nt, Artificial Sequence
  Synthetic
uuggaguuuagaggucagau

SEQ ID NO: 814722 - RNA, 20 nt, Artificial Sequence
  Synthetic
auauuagcccuuugucagau

SEQ ID NO: 814723 - RNA, 20 nt, Artificial Sequence
  Synthetic
uuuaccucugacauucagau

SEQ ID NO: 814724 - RNA, 20 nt, Artificial Sequence
  Synthetic
uaucaaucugugauucagau

SEQ ID NO: 814725 - RNA, 20 nt, Artificial Sequence
  Synthetic
auuuuauggacuauucagau

SEQ ID NO: 814726 - RNA, 20 nt, Artificial Sequence
  Synthetic
uuuagaaauuagcuucagau

SEQ ID NO: 814727 - RNA, 20 nt, Artificial Sequence
  Synthetic
caggagguagagaaagagau

SEQ ID NO: 814728 - RNA, 20 nt, Artificial Sequence
  Synthetic
uugcauuuggagaaagagau

SEQ ID NO: 814729 - RNA, 20 nt, Artificial Sequence
  Synthetic
ucuacacucucccaagagau

SEQ ID NO: 814730 - RNA, 20 nt, Artificial Sequence
  Synthetic
uuuguauuuuuagaagagau

SEQ ID NO: 814731 - RNA, 20 nt, Artificial Sequence
  Synthetic
uaaauggagaccuaagagau

SEQ ID NO: 814732 - RNA, 20 nt, Artificial Sequence
  Synthetic
aaaauggcuaugacagagau

SEQ ID NO: 814733 - RNA, 20 nt, Artificial Sequence
  Synthetic
cagaggagaacuacagagau

SEQ ID NO: 814734 - RNA, 20 nt, Artificial Sequence
  Synthetic
uaggcagcaugaccagagau

SEQ ID NO: 814735 - RNA, 20 nt, Artificial Sequence
  Synthetic
uuuguauuuuuagcagagau

SEQ ID NO: 814736 - RNA, 20 nt, Artificial Sequence
  Synthetic
cagaaguuugcugcagagau

SEQ ID NO: 814737 - RNA, 20 nt, Artificial Sequence
  Synthetic
uuguauuuuuuugcagagau

SEQ ID NO: 814738 - RNA, 20 nt, Artificial Sequence
  Synthetic
aagcagaguaaaagagagau

SEQ ID NO: 814739 - RNA, 20 nt, Artificial Sequence
  Synthetic
cggaaugggugaagagagau

SEQ ID NO: 814740 - RNA, 20 nt, Artificial Sequence
  Synthetic
agagagacacagagagagau

SEQ ID NO: 814741 - RNA, 20 nt, Artificial Sequence
  Synthetic
agugagagagagagagagau

SEQ ID NO: 814742 - RNA, 20 nt, Artificial Sequence
  Synthetic
ucuauuucugauagagagau

SEQ ID NO: 814743 - RNA, 20 nt, Artificial Sequence
  Synthetic
cagaggccaaagggagagau

SEQ ID NO: 814744 - RNA, 20 nt, Artificial Sequence
  Synthetic
aaaguaggaaugggagagau

SEQ ID NO: 814745 - RNA, 20 nt, Artificial Sequence
  Synthetic
cuaaugggauucugagagau

SEQ ID NO: 814746 - RNA, 20 nt, Artificial Sequence
  Synthetic
auagcgguauagugagagau

SEQ ID NO: 814747 - RNA, 20 nt, Artificial Sequence
  Synthetic
uuuuguauauggugagagau

SEQ ID NO: 814748 - RNA, 20 nt, Artificial Sequence
  Synthetic
uauauuuauaagcuagagau

SEQ ID NO: 814749 - RNA, 20 nt, Artificial Sequence
  Synthetic
uuuguauuuucaguagagau

SEQ ID NO: 814750 - RNA, 20 nt, Artificial Sequence
  Synthetic
uuuuuauuuucaguagagau

SEQ ID NO: 814751 - RNA, 20 nt, Artificial Sequence
  Synthetic
uuuguaucuuuaguagagau

SEQ ID NO: 814752 - RNA, 20 nt, Artificial Sequence
  Synthetic
ugugcauuuuuaguagagau

SEQ ID NO: 814753 - RNA, 20 nt, Artificial Sequence
  Synthetic
uucauauuuuuaguagagau

SEQ ID NO: 814754 - RNA, 20 nt, Artificial Sequence
  Synthetic
uuuauauuuuuaguagagau

SEQ ID NO: 814755 - RNA, 20 nt, Artificial Sequence
  Synthetic
uuucuauuuuuaguagagau

SEQ ID NO: 814756 - RNA, 20 nt, Artificial Sequence
  Synthetic
uugguauuuuuaguagagau

SEQ ID NO: 814757 - RNA, 20 nt, Artificial Sequence
  Synthetic
uuuguauuuuuaguagagau

SEQ ID NO: 814758 - RNA, 20 nt, Artificial Sequence
  Synthetic
uuuuuauuuuuaguagagau

SEQ ID NO: 814759 - RNA, 20 nt, Artificial Sequence
  Synthetic
uuuguguuuuuaguagagau

SEQ ID NO: 814760 - RNA, 20 nt, Artificial Sequence
  Synthetic
uuggauuuuuuaguagagau

SEQ ID NO: 814761 - RNA, 20 nt, Artificial Sequence
  Synthetic
uuguauuuuuuaguagagau

SEQ ID NO: 814762 - RNA, 20 nt, Artificial Sequence
  Synthetic
uuuuuguuuucuguagagau

SEQ ID NO: 814763 - RNA, 20 nt, Artificial Sequence
  Synthetic
ccuguguauuguguagagau

SEQ ID NO: 814764 - RNA, 20 nt, Artificial Sequence
  Synthetic
uuugaauucuuuguagagau

SEQ ID NO: 814765 - RNA, 20 nt, Artificial Sequence
  Synthetic
uuugcauuuuuuguagagau

SEQ ID NO: 814766 - RNA, 20 nt, Artificial Sequence
  Synthetic
uguuuuuuuuuuguagagau

SEQ ID NO: 814767 - RNA, 20 nt, Artificial Sequence
  Synthetic
ucacagagaagauuagagau

SEQ ID NO: 814768 - RNA, 20 nt, Artificial Sequence
  Synthetic
uagaacaacagguuagagau

SEQ ID NO: 814769 - RNA, 20 nt, Artificial Sequence
  Synthetic
aaaggcaacagagacgagau

SEQ ID NO: 814770 - RNA, 20 nt, Artificial Sequence
  Synthetic
uagaaagaacugcccgagau

SEQ ID NO: 814771 - RNA, 20 nt, Artificial Sequence
  Synthetic
uuuuuuuuuuuuugcgagau

SEQ ID NO: 814772 - RNA, 20 nt, Artificial Sequence
  Synthetic
ugcucauggaaaaaggagau

SEQ ID NO: 814773 - RNA, 20 nt, Artificial Sequence
  Synthetic
agugaaaagcaauaggagau

SEQ ID NO: 814774 - RNA, 20 nt, Artificial Sequence
  Synthetic
aggcaaugguauuaggagau

SEQ ID NO: 814775 - RNA, 20 nt, Artificial Sequence
  Synthetic
ucagcuagagauacggagau

SEQ ID NO: 814776 - RNA, 20 nt, Artificial Sequence
  Synthetic
acuacagagaugggggagau

SEQ ID NO: 814777 - RNA, 20 nt, Artificial Sequence
  Synthetic
cauccucgggguggggagau

SEQ ID NO: 814778 - RNA, 20 nt, Artificial Sequence
  Synthetic
caggaaguagaaugggagau

SEQ ID NO: 814779 - RNA, 20 nt, Artificial Sequence
  Synthetic
cucacuagacgcugggagau

SEQ ID NO: 814780 - RNA, 20 nt, Artificial Sequence
  Synthetic
ugcucaaaauucugggagau

SEQ ID NO: 814781 - RNA, 20 nt, Artificial Sequence
  Synthetic
aaccuucaaccaauggagau

SEQ ID NO: 814782 - RNA, 20 nt, Artificial Sequence
  Synthetic
cgaugagaacacauggagau

SEQ ID NO: 814783 - RNA, 20 nt, Artificial Sequence
  Synthetic
cauggugagaaacuggagau

SEQ ID NO: 814784 - RNA, 20 nt, Artificial Sequence
  Synthetic
auuggcuagccacuggagau

SEQ ID NO: 814785 - RNA, 20 nt, Artificial Sequence
  Synthetic
aaauuuggcuuccuggagau

SEQ ID NO: 814786 - RNA, 20 nt, Artificial Sequence
  Synthetic
aaugaagggacauuggagau

SEQ ID NO: 814787 - RNA, 20 nt, Artificial Sequence
  Synthetic
auaccuaauaucuuggagau

SEQ ID NO: 814788 - RNA, 20 nt, Artificial Sequence
  Synthetic
augugacccuauuuggagau

SEQ ID NO: 814789 - RNA, 20 nt, Artificial Sequence
  Synthetic
ugauccuuggaaaaugagau

SEQ ID NO: 814790 - RNA, 20 nt, Artificial Sequence
  Synthetic
aaaggagugaucaaugagau

SEQ ID NO: 814791 - RNA, 20 nt, Artificial Sequence
  Synthetic
cuugaauuaaauuaugagau

SEQ ID NO: 814792 - RNA, 20 nt, Artificial Sequence
  Synthetic
agugaugucuaaccugagau

SEQ ID NO: 814793 - RNA, 20 nt, Artificial Sequence
  Synthetic
aagggaaaaugaagugagau

SEQ ID NO: 814794 - RNA, 20 nt, Artificial Sequence
  Synthetic
ugugucucugcacgugagau

SEQ ID NO: 814795 - RNA, 20 nt, Artificial Sequence
  Synthetic
ugcuucugaggaggugagau

SEQ ID NO: 814796 - RNA, 20 nt, Artificial Sequence
  Synthetic
caguggggugggggugagau

SEQ ID NO: 814797 - RNA, 20 nt, Artificial Sequence
  Synthetic
uguguguuugcaugugagau

SEQ ID NO: 814798 - RNA, 20 nt, Artificial Sequence
  Synthetic
aguuaggaauugugugagau

SEQ ID NO: 814799 - RNA, 20 nt, Artificial Sequence
  Synthetic
uuauuaaucccuugugagau

SEQ ID NO: 814800 - RNA, 20 nt, Artificial Sequence
  Synthetic
uuuuuuuuccuucuugagau

SEQ ID NO: 814801 - RNA, 20 nt, Artificial Sequence
  Synthetic
uaagcaggugacuuugagau

SEQ ID NO: 814802 - RNA, 20 nt, Artificial Sequence
  Synthetic
aaugcugcaaccuuugagau

SEQ ID NO: 814803 - RNA, 20 nt, Artificial Sequence
  Synthetic
ucuuuauuuguuuuugagau

SEQ ID NO: 814804 - RNA, 20 nt, Artificial Sequence
  Synthetic
ugaacuuucuuuuuugagau

SEQ ID NO: 814805 - RNA, 20 nt, Artificial Sequence
  Synthetic
ucuaggguguagaaauagau

SEQ ID NO: 814806 - RNA, 20 nt, Artificial Sequence
  Synthetic
aauuaaauugcucaauagau

SEQ ID NO: 814807 - RNA, 20 nt, Artificial Sequence
  Synthetic
auuucuguacuucaauagau

SEQ ID NO: 814808 - RNA, 20 nt, Artificial Sequence
  Synthetic
auaauuugcaacuaauagau

SEQ ID NO: 814809 - RNA, 20 nt, Artificial Sequence
  Synthetic
aacccauuucaaccauagau

SEQ ID NO: 814810 - RNA, 20 nt, Artificial Sequence
  Synthetic
ugaucugugacagcauagau

SEQ ID NO: 814811 - RNA, 20 nt, Artificial Sequence
  Synthetic
aggcagcaugagucauagau

SEQ ID NO: 814812 - RNA, 20 nt, Artificial Sequence
  Synthetic
uuccuccuguagucauagau

SEQ ID NO: 814813 - RNA, 20 nt, Artificial Sequence
  Synthetic
uccuauucuaugucauagau

SEQ ID NO: 814814 - RNA, 20 nt, Artificial Sequence
  Synthetic
uaaacugacgacagauagau

SEQ ID NO: 814815 - RNA, 20 nt, Artificial Sequence
  Synthetic
uaaagcaaaggaggauagau

SEQ ID NO: 814816 - RNA, 20 nt, Artificial Sequence
  Synthetic
uggagacaacaaauauagau

SEQ ID NO: 814817 - RNA, 20 nt, Artificial Sequence
  Synthetic
ucauauaaagaaauauagau

SEQ ID NO: 814818 - RNA, 20 nt, Artificial Sequence
  Synthetic
ugcaaagcuuaacuauagau

SEQ ID NO: 814819 - RNA, 20 nt, Artificial Sequence
  Synthetic
uuggguuggcucaccuagau

SEQ ID NO: 814820 - RNA, 20 nt, Artificial Sequence
  Synthetic
aacauaacugcuaccuagau

SEQ ID NO: 814821 - RNA, 20 nt, Artificial Sequence
  Synthetic
uaguuugauaaacccuagau

SEQ ID NO: 814822 - RNA, 20 nt, Artificial Sequence
  Synthetic
aaaauaaauuauagcuagau

SEQ ID NO: 814823 - RNA, 20 nt, Artificial Sequence
  Synthetic
cuucacagcaacaucuagau

SEQ ID NO: 814824 - RNA, 20 nt, Artificial Sequence
  Synthetic
uaagaagcauggcucuagau

SEQ ID NO: 814825 - RNA, 20 nt, Artificial Sequence
  Synthetic
aauuauaaaaaucucuagau

SEQ ID NO: 814826 - RNA, 20 nt, Artificial Sequence
  Synthetic
cuuuggggaagucucuagau

SEQ ID NO: 814827 - RNA, 20 nt, Artificial Sequence
  Synthetic
auucaccaagaaaaguagau

SEQ ID NO: 814828 - RNA, 20 nt, Artificial Sequence
  Synthetic
uaauacaugugucaguagau

SEQ ID NO: 814829 - RNA, 20 nt, Artificial Sequence
  Synthetic
aaauuugcaguucaguagau

SEQ ID NO: 814830 - RNA, 20 nt, Artificial Sequence
  Synthetic
accaauaagggagaguagau

SEQ ID NO: 814831 - RNA, 20 nt, Artificial Sequence
  Synthetic
uugcuaauuggagaguagau

SEQ ID NO: 814832 - RNA, 20 nt, Artificial Sequence
  Synthetic
aauucugagagggaguagau

SEQ ID NO: 814833 - RNA, 20 nt, Artificial Sequence
  Synthetic
ccucagccuccugaguagau

SEQ ID NO: 814834 - RNA, 20 nt, Artificial Sequence
  Synthetic
ucauaaaaauuauaguagau

SEQ ID NO: 814835 - RNA, 20 nt, Artificial Sequence
  Synthetic
uuuuuuccugccuaguagau

SEQ ID NO: 814836 - RNA, 20 nt, Artificial Sequence
  Synthetic
agaugccaauuaacguagau

SEQ ID NO: 814837 - RNA, 20 nt, Artificial Sequence
  Synthetic
uuagcuuuggggugguagau

SEQ ID NO: 814838 - RNA, 20 nt, Artificial Sequence
  Synthetic
ucaaugccuccucuguagau

SEQ ID NO: 814839 - RNA, 20 nt, Artificial Sequence
  Synthetic
auaaaaguauguguguagau

SEQ ID NO: 814840 - RNA, 20 nt, Artificial Sequence
  Synthetic
aaggaaauuaaauuguagau

SEQ ID NO: 814841 - RNA, 20 nt, Artificial Sequence
  Synthetic
uaaaaauacaaaaauuagau

SEQ ID NO: 814842 - RNA, 20 nt, Artificial Sequence
  Synthetic
uaaaaaccuguggauuagau

SEQ ID NO: 814843 - RNA, 20 nt, Artificial Sequence
  Synthetic
caggaaagacaugauuagau

SEQ ID NO: 814844 - RNA, 20 nt, Artificial Sequence
  Synthetic
aaauuaguauaauauuagau

SEQ ID NO: 814845 - RNA, 20 nt, Artificial Sequence
  Synthetic
auacaaaauuucaguuagau

SEQ ID NO: 814846 - RNA, 20 nt, Artificial Sequence
  Synthetic
uacacagugagugguuagau

SEQ ID NO: 814847 - RNA, 20 nt, Artificial Sequence
  Synthetic
ucuaaaaauagguguuagau

SEQ ID NO: 814848 - RNA, 20 nt, Artificial Sequence
  Synthetic
uaaaugauaaauuguuagau

SEQ ID NO: 814849 - RNA, 20 nt, Artificial Sequence
  Synthetic
uuuucaaagcaaauuuagau

SEQ ID NO: 814850 - RNA, 20 nt, Artificial Sequence
  Synthetic
aaaugcuaagaaauuuagau

SEQ ID NO: 814851 - RNA, 20 nt, Artificial Sequence
  Synthetic
agcaagaggaccauuuagau

SEQ ID NO: 814852 - RNA, 20 nt, Artificial Sequence
  Synthetic
aacccuuagcucauuuagau

SEQ ID NO: 814853 - RNA, 20 nt, Artificial Sequence
  Synthetic
uagucacuaaaauuuuagau

SEQ ID NO: 814854 - RNA, 20 nt, Artificial Sequence
  Synthetic
uuccuuaauaacuuuuagau

SEQ ID NO: 814855 - RNA, 20 nt, Artificial Sequence
  Synthetic
aaaucaaaacauuuuuagau

SEQ ID NO: 814856 - RNA, 20 nt, Artificial Sequence
  Synthetic
aacauuugauuuuuuuagau

SEQ ID NO: 814857 - RNA, 20 nt, Artificial Sequence
  Synthetic
uuacaucuguuagaaacgau

SEQ ID NO: 814858 - RNA, 20 nt, Artificial Sequence
  Synthetic
aacaggagaaggagaacgau

SEQ ID NO: 814859 - RNA, 20 nt, Artificial Sequence
  Synthetic
cuuucuacacuuuacacgau

SEQ ID NO: 814860 - RNA, 20 nt, Artificial Sequence
  Synthetic
uuuucaauccuccccacgau

SEQ ID NO: 814861 - RNA, 20 nt, Artificial Sequence
  Synthetic
agauuuugggcugagacgau

SEQ ID NO: 814862 - RNA, 20 nt, Artificial Sequence
  Synthetic
aguuuuugggcugagacgau

SEQ ID NO: 814863 - RNA, 20 nt, Artificial Sequence
  Synthetic
agauuuuggguugagacgau

SEQ ID NO: 814864 - RNA, 20 nt, Artificial Sequence
  Synthetic
ccuugagggauguauacgau

SEQ ID NO: 814865 - RNA, 20 nt, Artificial Sequence
  Synthetic
uaaguaccaaaaucuacgau

SEQ ID NO: 814866 - RNA, 20 nt, Artificial Sequence
  Synthetic
uagugagcauaguacccgau

SEQ ID NO: 814867 - RNA, 20 nt, Artificial Sequence
  Synthetic
uugcacaggaaugggccgau

SEQ ID NO: 814868 - RNA, 20 nt, Artificial Sequence
  Synthetic
ucauggaccuuacauccgau

SEQ ID NO: 814869 - RNA, 20 nt, Artificial Sequence
  Synthetic
agaaauuccaauacuccgau

SEQ ID NO: 814870 - RNA, 20 nt, Artificial Sequence
  Synthetic
ucagccaugaaccuagcgau

SEQ ID NO: 814871 - RNA, 20 nt, Artificial Sequence
  Synthetic
augcucacuaacauggcgau

SEQ ID NO: 814872 - RNA, 20 nt, Artificial Sequence
  Synthetic
auuucuguaaaaaaugcgau

SEQ ID NO: 814873 - RNA, 20 nt, Artificial Sequence
  Synthetic
ugcaaugaccuggaugcgau

SEQ ID NO: 814874 - RNA, 20 nt, Artificial Sequence
  Synthetic
uuaagacuuuuggcugcgau

SEQ ID NO: 814875 - RNA, 20 nt, Artificial Sequence
  Synthetic
agguuuuuacugugugcgau

SEQ ID NO: 814876 - RNA, 20 nt, Artificial Sequence
  Synthetic
ugauuaggucuucaaucgau

SEQ ID NO: 814877 - RNA, 20 nt, Artificial Sequence
  Synthetic
cauaccaauacuuaaucgau

SEQ ID NO: 814878 - RNA, 20 nt, Artificial Sequence
  Synthetic
acgaaguuugcugcaucgau

SEQ ID NO: 814879 - RNA, 20 nt, Artificial Sequence
  Synthetic
aaacucgugguuuccucgau

SEQ ID NO: 814880 - RNA, 20 nt, Artificial Sequence
  Synthetic
uccauaaaugccaucucgau

SEQ ID NO: 814881 - RNA, 20 nt, Artificial Sequence
  Synthetic
cuguacacuuuauucucgau

SEQ ID NO: 814882 - RNA, 20 nt, Artificial Sequence
  Synthetic
ucuauucucuuagugucgau

SEQ ID NO: 814883 - RNA, 20 nt, Artificial Sequence
  Synthetic
caagucugcucuacuucgau

SEQ ID NO: 814884 - RNA, 20 nt, Artificial Sequence
  Synthetic
ccugcuuuucucccuucgau

SEQ ID NO: 814885 - RNA, 20 nt, Artificial Sequence
  Synthetic
auaaauaggcaauuuucgau

SEQ ID NO: 814886 - RNA, 20 nt, Artificial Sequence
  Synthetic
uuuauauguuuuaaaaggau

SEQ ID NO: 814887 - RNA, 20 nt, Artificial Sequence
  Synthetic
cuuaacaagaucgaaaggau

SEQ ID NO: 814888 - RNA, 20 nt, Artificial Sequence
  Synthetic
aucaaagugagugaaaggau

SEQ ID NO: 814889 - RNA, 20 nt, Artificial Sequence
  Synthetic
ucgaaaagucggccaaggau

SEQ ID NO: 814890 - RNA, 20 nt, Artificial Sequence
  Synthetic
cuagaguuuuaaagaaggau

SEQ ID NO: 814891 - RNA, 20 nt, Artificial Sequence
  Synthetic
ucagaagaaacaagaaggau

SEQ ID NO: 814892 - RNA, 20 nt, Artificial Sequence
  Synthetic
uccuuugugcagagaaggau

SEQ ID NO: 814893 - RNA, 20 nt, Artificial Sequence
  Synthetic
aagcacucauugagaaggau

SEQ ID NO: 814894 - RNA, 20 nt, Artificial Sequence
  Synthetic
cugaagaauuugagaaggau

SEQ ID NO: 814895 - RNA, 20 nt, Artificial Sequence
  Synthetic
aaauaacuuccuagaaggau

SEQ ID NO: 814896 - RNA, 20 nt, Artificial Sequence
  Synthetic
uuacccaaaacaugaaggau

SEQ ID NO: 814897 - RNA, 20 nt, Artificial Sequence
  Synthetic
agguauuucaugauaaggau

SEQ ID NO: 814898 - RNA, 20 nt, Artificial Sequence
  Synthetic
aaaauccuagcaaacaggau

SEQ ID NO: 814899 - RNA, 20 nt, Artificial Sequence
  Synthetic
aguacagugguuaacaggau

SEQ ID NO: 814900 - RNA, 20 nt, Artificial Sequence
  Synthetic
aaguuuaauugacacaggau

SEQ ID NO: 814901 - RNA, 20 nt, Artificial Sequence
  Synthetic
uuuaagaaauuauacaggau

SEQ ID NO: 814902 - RNA, 20 nt, Artificial Sequence
  Synthetic
auugacaauaaguacaggau

SEQ ID NO: 814903 - RNA, 20 nt, Artificial Sequence
  Synthetic
cuaucauacauguacaggau

SEQ ID NO: 814904 - RNA, 20 nt, Artificial Sequence
  Synthetic
cagagaguguagaccaggau

SEQ ID NO: 814905 - RNA, 20 nt, Artificial Sequence
  Synthetic
uguaaauaaagagccaggau

SEQ ID NO: 814906 - RNA, 20 nt, Artificial Sequence
  Synthetic
agagggcuuagaagcaggau

SEQ ID NO: 814907 - RNA, 20 nt, Artificial Sequence
  Synthetic
accgggaugaacagcaggau

SEQ ID NO: 814908 - RNA, 20 nt, Artificial Sequence
  Synthetic
uucgucuauaaaaucaggau

SEQ ID NO: 814909 - RNA, 20 nt, Artificial Sequence
  Synthetic
aggcacuacauacucaggau

SEQ ID NO: 814910 - RNA, 20 nt, Artificial Sequence
  Synthetic
auaaacagaaauaagaggau

SEQ ID NO: 814911 - RNA, 20 nt, Artificial Sequence
  Synthetic
aggauuagagcacagaggau

SEQ ID NO: 814912 - RNA, 20 nt, Artificial Sequence
  Synthetic
caacaggugcuggagaggau

SEQ ID NO: 814913 - RNA, 20 nt, Artificial Sequence
  Synthetic
aguuggggauggaggaggau

SEQ ID NO: 814914 - RNA, 20 nt, Artificial Sequence
  Synthetic
aacauagcugcugggaggau

SEQ ID NO: 814915 - RNA, 20 nt, Artificial Sequence
  Synthetic
uagucuucuguugggaggau

SEQ ID NO: 814916 - RNA, 20 nt, Artificial Sequence
  Synthetic
auaugcuaaguacugaggau

SEQ ID NO: 814917 - RNA, 20 nt, Artificial Sequence
  Synthetic
aaggaugguuaccugaggau

SEQ ID NO: 814918 - RNA, 20 nt, Artificial Sequence
  Synthetic
auugccuggcuggugaggau

SEQ ID NO: 814919 - RNA, 20 nt, Artificial Sequence
  Synthetic
aauaagaauucguugaggau

SEQ ID NO: 814920 - RNA, 20 nt, Artificial Sequence
  Synthetic
uauaucaaauucaauaggau

SEQ ID NO: 814921 - RNA, 20 nt, Artificial Sequence
  Synthetic
aaaaaugacagggauaggau

SEQ ID NO: 814922 - RNA, 20 nt, Artificial Sequence
  Synthetic
ugucaucuguaaacuaggau

SEQ ID NO: 814923 - RNA, 20 nt, Artificial Sequence
  Synthetic
uagucaauucaugcuaggau

SEQ ID NO: 814924 - RNA, 20 nt, Artificial Sequence
  Synthetic
ugauucagugggucuaggau

SEQ ID NO: 814925 - RNA, 20 nt, Artificial Sequence
  Synthetic
cagcucagccacaguaggau

SEQ ID NO: 814926 - RNA, 20 nt, Artificial Sequence
  Synthetic
cagcuuagucacaguaggau

SEQ ID NO: 814927 - RNA, 20 nt, Artificial Sequence
  Synthetic
ugagaauuuuccaguaggau

SEQ ID NO: 814928 - RNA, 20 nt, Artificial Sequence
  Synthetic
ugugaugauacugguaggau

SEQ ID NO: 814929 - RNA, 20 nt, Artificial Sequence
  Synthetic
ugugggggcacaauuaggau

SEQ ID NO: 814930 - RNA, 20 nt, Artificial Sequence
  Synthetic
uggaaggugguuauuaggau

SEQ ID NO: 814931 - RNA, 20 nt, Artificial Sequence
  Synthetic
uuacauauaaaucuuaggau

SEQ ID NO: 814932 - RNA, 20 nt, Artificial Sequence
  Synthetic
uaggcaaggcaguuuaggau

SEQ ID NO: 814933 - RNA, 20 nt, Artificial Sequence
  Synthetic
aaauuggcuaagaaacggau

SEQ ID NO: 814934 - RNA, 20 nt, Artificial Sequence
  Synthetic
uugcaacuuauauuacggau

SEQ ID NO: 814935 - RNA, 20 nt, Artificial Sequence
  Synthetic
uuucaggcucauaggcggau

SEQ ID NO: 814936 - RNA, 20 nt, Artificial Sequence
  Synthetic
aacaaaaauuaaaaagggau

SEQ ID NO: 814937 - RNA, 20 nt, Artificial Sequence
  Synthetic
uuuaccaggccucaagggau

SEQ ID NO: 814938 - RNA, 20 nt, Artificial Sequence
  Synthetic
uaaagguagggggaagggau

SEQ ID NO: 814939 - RNA, 20 nt, Artificial Sequence
  Synthetic
uccucauaguaguaagggau

SEQ ID NO: 814940 - RNA, 20 nt, Artificial Sequence
  Synthetic
ccaggaaaaaugacagggau

SEQ ID NO: 814941 - RNA, 20 nt, Artificial Sequence
  Synthetic
uaauuuuaguaagcagggau

SEQ ID NO: 814942 - RNA, 20 nt, Artificial Sequence
  Synthetic
cacauguuucuagcagggau

SEQ ID NO: 814943 - RNA, 20 nt, Artificial Sequence
  Synthetic
aaagaggcccuugcagggau

SEQ ID NO: 814944 - RNA, 20 nt, Artificial Sequence
  Synthetic
aauuuaaauugaagagggau

SEQ ID NO: 814945 - RNA, 20 nt, Artificial Sequence
  Synthetic
aaaaagaaauaaggagggau

SEQ ID NO: 814946 - RNA, 20 nt, Artificial Sequence
  Synthetic
aauugcuugaggugagggau

SEQ ID NO: 814947 - RNA, 20 nt, Artificial Sequence
  Synthetic
cagagaaauaacuuagggau

SEQ ID NO: 814948 - RNA, 20 nt, Artificial Sequence
  Synthetic
aggggagcugaaaaggggau

SEQ ID NO: 814949 - RNA, 20 nt, Artificial Sequence
  Synthetic
aaagacaaaaagaaggggau

SEQ ID NO: 814950 - RNA, 20 nt, Artificial Sequence
  Synthetic
accggggccucucaggggau

SEQ ID NO: 814951 - RNA, 20 nt, Artificial Sequence
  Synthetic
uuaauauuaagggaggggau

SEQ ID NO: 814952 - RNA, 20 nt, Artificial Sequence
  Synthetic
uaaguggaaauaagggggau

SEQ ID NO: 814953 - RNA, 20 nt, Artificial Sequence
  Synthetic
cuguuuacuuugagggggau

SEQ ID NO: 814954 - RNA, 20 nt, Artificial Sequence
  Synthetic
ccucaguauccaugggggau

SEQ ID NO: 814955 - RNA, 20 nt, Artificial Sequence
  Synthetic
ucacacaccaguugggggau

SEQ ID NO: 814956 - RNA, 20 nt, Artificial Sequence
  Synthetic
aaaucagaaucucuggggau

SEQ ID NO: 814957 - RNA, 20 nt, Artificial Sequence
  Synthetic
uagcaguuucuucuggggau

SEQ ID NO: 814958 - RNA, 20 nt, Artificial Sequence
  Synthetic
ugcauuccauugaaugggau

SEQ ID NO: 814959 - RNA, 20 nt, Artificial Sequence
  Synthetic
uacagagcagaagaugggau

SEQ ID NO: 814960 - RNA, 20 nt, Artificial Sequence
  Synthetic
aaauuaaugauguaugggau

SEQ ID NO: 814961 - RNA, 20 nt, Artificial Sequence
  Synthetic
ugaguucugacugcugggau

SEQ ID NO: 814962 - RNA, 20 nt, Artificial Sequence
  Synthetic
ugaaacuugacugcugggau

SEQ ID NO: 814963 - RNA, 20 nt, Artificial Sequence
  Synthetic
ugauucaguagaucugggau

SEQ ID NO: 814964 - RNA, 20 nt, Artificial Sequence
  Synthetic
ugugucaguuggucugggau

SEQ ID NO: 814965 - RNA, 20 nt, Artificial Sequence
  Synthetic
acuuuugaaaaaggugggau

SEQ ID NO: 814966 - RNA, 20 nt, Artificial Sequence
  Synthetic
aguauagcagauggugggau

SEQ ID NO: 814967 - RNA, 20 nt, Artificial Sequence
  Synthetic
aaagaugaaauaugugggau

SEQ ID NO: 814968 - RNA, 20 nt, Artificial Sequence
  Synthetic
aguuuguauuucugugggau

SEQ ID NO: 814969 - RNA, 20 nt, Artificial Sequence
  Synthetic
auauccaaaaugcuugggau

SEQ ID NO: 814970 - RNA, 20 nt, Artificial Sequence
  Synthetic
cugcaaaaucaguuugggau

SEQ ID NO: 814971 - RNA, 20 nt, Artificial Sequence
  Synthetic
caagaaaaagaaaaauggau

SEQ ID NO: 814972 - RNA, 20 nt, Artificial Sequence
  Synthetic
uuaaaauaauaaaaauggau

SEQ ID NO: 814973 - RNA, 20 nt, Artificial Sequence
  Synthetic
ucacaguauuauaaauggau

SEQ ID NO: 814974 - RNA, 20 nt, Artificial Sequence
  Synthetic
acucuccccauuaaauggau

SEQ ID NO: 814975 - RNA, 20 nt, Artificial Sequence
  Synthetic
auagaagauaaucaauggau

SEQ ID NO: 814976 - RNA, 20 nt, Artificial Sequence
  Synthetic
aauaaagagccagaauggau

SEQ ID NO: 814977 - RNA, 20 nt, Artificial Sequence
  Synthetic
uugcuuuguauuuaauggau

SEQ ID NO: 814978 - RNA, 20 nt, Artificial Sequence
  Synthetic
ucaauauauaacccauggau

SEQ ID NO: 814979 - RNA, 20 nt, Artificial Sequence
  Synthetic
aacauuccaugcucauggau

SEQ ID NO: 814980 - RNA, 20 nt, Artificial Sequence
  Synthetic
cuacuucugaaaagauggau

SEQ ID NO: 814981 - RNA, 20 nt, Artificial Sequence
  Synthetic
caucucuuaauaagauggau

SEQ ID NO: 814982 - RNA, 20 nt, Artificial Sequence
  Synthetic
ugauugauugauggauggau

SEQ ID NO: 814983 - RNA, 20 nt, Artificial Sequence
  Synthetic
aaguaacugaguggauggau

SEQ ID NO: 814984 - RNA, 20 nt, Artificial Sequence
  Synthetic
cauucaaaauaaugauggau

SEQ ID NO: 814985 - RNA, 20 nt, Artificial Sequence
  Synthetic
uccacuccuugaauauggau

SEQ ID NO: 814986 - RNA, 20 nt, Artificial Sequence
  Synthetic
aguaucagucuauuauggau

SEQ ID NO: 814987 - RNA, 20 nt, Artificial Sequence
  Synthetic
caaaauguaaagcacuggau

SEQ ID NO: 814988 - RNA, 20 nt, Artificial Sequence
  Synthetic
cuguuaaaagaucacuggau

SEQ ID NO: 814989 - RNA, 20 nt, Artificial Sequence
  Synthetic
uuuaauuauuauuacuggau

SEQ ID NO: 814990 - RNA, 20 nt, Artificial Sequence
  Synthetic
agaagagugaccagcuggau

SEQ ID NO: 814991 - RNA, 20 nt, Artificial Sequence
  Synthetic
uccccuaagaaauucuggau

SEQ ID NO: 814992 - RNA, 20 nt, Artificial Sequence
  Synthetic
ugcaguaggagauucuggau

SEQ ID NO: 814993 - RNA, 20 nt, Artificial Sequence
  Synthetic
aauuguaccaggaaguggau

SEQ ID NO: 814994 - RNA, 20 nt, Artificial Sequence
  Synthetic
cuugauuaggguaaguggau

SEQ ID NO: 814995 - RNA, 20 nt, Artificial Sequence
  Synthetic
cuuguuuagauuggguggau

SEQ ID NO: 814996 - RNA, 20 nt, Artificial Sequence
  Synthetic
aacaaaacugugauguggau

SEQ ID NO: 814997 - RNA, 20 nt, Artificial Sequence
  Synthetic
uuaaccuggcaucuguggau

SEQ ID NO: 814998 - RNA, 20 nt, Artificial Sequence
  Synthetic
cauaccacucugguguggau

SEQ ID NO: 814999 - RNA, 20 nt, Artificial Sequence
  Synthetic
ugagaaaaaaaaaauuggau

SEQ ID NO: 815000 - RNA, 20 nt, Artificial Sequence
  Synthetic
aguagaaugggagauuggau

SEQ ID NO: 815001 - RNA, 20 nt, Artificial Sequence
  Synthetic
uggaaaucugcaaguuggau

SEQ ID NO: 815002 - RNA, 20 nt, Artificial Sequence
  Synthetic
agauucugauuuaguuggau

SEQ ID NO: 815003 - RNA, 20 nt, Artificial Sequence
  Synthetic
caguaaaauagaauuuggau

SEQ ID NO: 815004 - RNA, 20 nt, Artificial Sequence
  Synthetic
ucauugauggacauuuggau

SEQ ID NO: 815005 - RNA, 20 nt, Artificial Sequence
  Synthetic
auucaagaugagauuuggau

SEQ ID NO: 815006 - RNA, 20 nt, Artificial Sequence
  Synthetic
ugugggucaaggauuuggau

SEQ ID NO: 815007 - RNA, 20 nt, Artificial Sequence
  Synthetic
uucuguuucaugauuuggau

SEQ ID NO: 815008 - RNA, 20 nt, Artificial Sequence
  Synthetic
ucacucugcauucuuuggau

SEQ ID NO: 815009 - RNA, 20 nt, Artificial Sequence
  Synthetic
uuucuuucuuuucuuuggau

SEQ ID NO: 815010 - RNA, 20 nt, Artificial Sequence
  Synthetic
uccuucgcccacuuuuggau

SEQ ID NO: 815011 - RNA, 20 nt, Artificial Sequence
  Synthetic
ucaccucauaucuuuuggau

SEQ ID NO: 815012 - RNA, 20 nt, Artificial Sequence
  Synthetic
acugggaaugucuuuuggau

SEQ ID NO: 815013 - RNA, 20 nt, Artificial Sequence
  Synthetic
agauuaaaaaaaaaaaugau

SEQ ID NO: 815014 - RNA, 20 nt, Artificial Sequence
  Synthetic
acugcaauaggaaaaaugau

SEQ ID NO: 815015 - RNA, 20 nt, Artificial Sequence
  Synthetic
agaaauuguuugaaaaugau

SEQ ID NO: 815016 - RNA, 20 nt, Artificial Sequence
  Synthetic
uggacuagaguggaaaugau

SEQ ID NO: 815017 - RNA, 20 nt, Artificial Sequence
  Synthetic
aaaguuaucgaguaaaugau

SEQ ID NO: 815018 - RNA, 20 nt, Artificial Sequence
  Synthetic
agaaucacugaguaaaugau

SEQ ID NO: 815019 - RNA, 20 nt, Artificial Sequence
  Synthetic
aauauauaagauuaaaugau

SEQ ID NO: 815020 - RNA, 20 nt, Artificial Sequence
  Synthetic
caucccuaaauaacaaugau

SEQ ID NO: 815021 - RNA, 20 nt, Artificial Sequence
  Synthetic
acuucuccucacccaaugau

SEQ ID NO: 815022 - RNA, 20 nt, Artificial Sequence
  Synthetic
aaguacugauuuagaaugau

SEQ ID NO: 815023 - RNA, 20 nt, Artificial Sequence
  Synthetic
ugguugcagcaaugaaugau

SEQ ID NO: 815024 - RNA, 20 nt, Artificial Sequence
  Synthetic
uuuuaaucauugcuaaugau

SEQ ID NO: 815025 - RNA, 20 nt, Artificial Sequence
  Synthetic
uuagaguucuugcuaaugau

SEQ ID NO: 815026 - RNA, 20 nt, Artificial Sequence
  Synthetic
uagccauaaaaauuaaugau

SEQ ID NO: 815027 - RNA, 20 nt, Artificial Sequence
  Synthetic
uaauugaaaaguaacaugau

SEQ ID NO: 815028 - RNA, 20 nt, Artificial Sequence
  Synthetic
aacuuuaauacauacaugau

SEQ ID NO: 815029 - RNA, 20 nt, Artificial Sequence
  Synthetic
aaaccauuuccagccaugau

SEQ ID NO: 815030 - RNA, 20 nt, Artificial Sequence
  Synthetic
uacuguugucaaggcaugau

SEQ ID NO: 815031 - RNA, 20 nt, Artificial Sequence
  Synthetic
agguacaucauuugcaugau

SEQ ID NO: 815032 - RNA, 20 nt, Artificial Sequence
  Synthetic
cuugcaacacugcucaugau

SEQ ID NO: 815033 - RNA, 20 nt, Artificial Sequence
  Synthetic
ugccuguugacucucaugau

SEQ ID NO: 815034 - RNA, 20 nt, Artificial Sequence
  Synthetic
auuauuuaaaaacagaugau

SEQ ID NO: 815035 - RNA, 20 nt, Artificial Sequence
  Synthetic
aagaaagaaagucagaugau

SEQ ID NO: 815036 - RNA, 20 nt, Artificial Sequence
  Synthetic
aacuuugccuaguagaugau

SEQ ID NO: 815037 - RNA, 20 nt, Artificial Sequence
  Synthetic
aaauaccuaauguagaugau

SEQ ID NO: 815038 - RNA, 20 nt, Artificial Sequence
  Synthetic
agaggaucagcuucgaugau

SEQ ID NO: 815039 - RNA, 20 nt, Artificial Sequence
  Synthetic
ccauuuuuccaguggaugau

SEQ ID NO: 815040 - RNA, 20 nt, Artificial Sequence
  Synthetic
agcaagugucuugugaugau

SEQ ID NO: 815041 - RNA, 20 nt, Artificial Sequence
  Synthetic
ugaugauuuucuuugaugau

SEQ ID NO: 815042 - RNA, 20 nt, Artificial Sequence
  Synthetic
acacuagcaaagcauaugau

SEQ ID NO: 815043 - RNA, 20 nt, Artificial Sequence
  Synthetic
uaggccucugguccuaugau

SEQ ID NO: 815044 - RNA, 20 nt, Artificial Sequence
  Synthetic
uuuuugaaaauggcuaugau

SEQ ID NO: 815045 - RNA, 20 nt, Artificial Sequence
  Synthetic
uguuucuucuacucuaugau

SEQ ID NO: 815046 - RNA, 20 nt, Artificial Sequence
  Synthetic
uuucauuuucauucuaugau

SEQ ID NO: 815047 - RNA, 20 nt, Artificial Sequence
  Synthetic
ugauguuuucaacguaugau

SEQ ID NO: 815048 - RNA, 20 nt, Artificial Sequence
  Synthetic
cuuuacuaauacauuaugau

SEQ ID NO: 815049 - RNA, 20 nt, Artificial Sequence
  Synthetic
aaugcgauugggauuaugau

SEQ ID NO: 815050 - RNA, 20 nt, Artificial Sequence
  Synthetic
ugauauuuucaacuuaugau

SEQ ID NO: 815051 - RNA, 20 nt, Artificial Sequence
  Synthetic
ugauguuuucaacuuaugau

SEQ ID NO: 815052 - RNA, 20 nt, Artificial Sequence
  Synthetic
uaacauuuucaauuuaugau

SEQ ID NO: 815053 - RNA, 20 nt, Artificial Sequence
  Synthetic
aauuuuaaaagauuuaugau

SEQ ID NO: 815054 - RNA, 20 nt, Artificial Sequence
  Synthetic
uuuauauuuuuauuuaugau

SEQ ID NO: 815055 - RNA, 20 nt, Artificial Sequence
  Synthetic
ugauuuuuugacuuuaugau

SEQ ID NO: 815056 - RNA, 20 nt, Artificial Sequence
  Synthetic
ugcuuauuauaaaaacugau

SEQ ID NO: 815057 - RNA, 20 nt, Artificial Sequence
  Synthetic
uagugagcauaguaacugau

SEQ ID NO: 815058 - RNA, 20 nt, Artificial Sequence
  Synthetic
cugaagaauagguaacugau

SEQ ID NO: 815059 - RNA, 20 nt, Artificial Sequence
  Synthetic
aacaggcccugguaacugau

SEQ ID NO: 815060 - RNA, 20 nt, Artificial Sequence
  Synthetic
ccugaauacagcacacugau

SEQ ID NO: 815061 - RNA, 20 nt, Artificial Sequence
  Synthetic
ucugaauacagcacacugau

SEQ ID NO: 815062 - RNA, 20 nt, Artificial Sequence
  Synthetic
agccccuggaaaccacugau

SEQ ID NO: 815063 - RNA, 20 nt, Artificial Sequence
  Synthetic
uucuccagucugccacugau

SEQ ID NO: 815064 - RNA, 20 nt, Artificial Sequence
  Synthetic
uuuaguuucagagcacugau

SEQ ID NO: 815065 - RNA, 20 nt, Artificial Sequence
  Synthetic
uuauccaguccaucacugau

SEQ ID NO: 815066 - RNA, 20 nt, Artificial Sequence
  Synthetic
uuauccagucuaucacugau

SEQ ID NO: 815067 - RNA, 20 nt, Artificial Sequence
  Synthetic
caaugguguaaaagacugau

SEQ ID NO: 815068 - RNA, 20 nt, Artificial Sequence
  Synthetic
cucuuucucaaaauacugau

SEQ ID NO: 815069 - RNA, 20 nt, Artificial Sequence
  Synthetic
aaacagcugacaauacugau

SEQ ID NO: 815070 - RNA, 20 nt, Artificial Sequence
  Synthetic
acuuuuagaauccuacugau

SEQ ID NO: 815071 - RNA, 20 nt, Artificial Sequence
  Synthetic
cauuaaccgaguuuacugau

SEQ ID NO: 815072 - RNA, 20 nt, Artificial Sequence
  Synthetic
uaauaagcaugguaccugau

SEQ ID NO: 815073 - RNA, 20 nt, Artificial Sequence
  Synthetic
uucauuuuccauacccugau

SEQ ID NO: 815074 - RNA, 20 nt, Artificial Sequence
  Synthetic
cugcauucuuuuacccugau

SEQ ID NO: 815075 - RNA, 20 nt, Artificial Sequence
  Synthetic
uuuauuuuuuuuccccugau

SEQ ID NO: 815076 - RNA, 20 nt, Artificial Sequence
  Synthetic
uucugaaauccagcccugau

SEQ ID NO: 815077 - RNA, 20 nt, Artificial Sequence
  Synthetic
aguagcugaugaauccugau

SEQ ID NO: 815078 - RNA, 20 nt, Artificial Sequence
  Synthetic
aagacgggaagguuccugau

SEQ ID NO: 815079 - RNA, 20 nt, Artificial Sequence
  Synthetic
uaugcagaagauaagcugau

SEQ ID NO: 815080 - RNA, 20 nt, Artificial Sequence
  Synthetic
cacaccugcuuugagcugau

SEQ ID NO: 815081 - RNA, 20 nt, Artificial Sequence
  Synthetic
auuuaccuaccauagcugau

SEQ ID NO: 815082 - RNA, 20 nt, Artificial Sequence
  Synthetic
uugacaaaguuuuagcugau

SEQ ID NO: 815083 - RNA, 20 nt, Artificial Sequence
  Synthetic
cuguguggacagaggcugau

SEQ ID NO: 815084 - RNA, 20 nt, Artificial Sequence
  Synthetic
ucaacuuaugaugggcugau

SEQ ID NO: 815085 - RNA, 20 nt, Artificial Sequence
  Synthetic
uggccagcaucuuggcugau

SEQ ID NO: 815086 - RNA, 20 nt, Artificial Sequence
  Synthetic
aaacacucuagaaugcugau

SEQ ID NO: 815087 - RNA, 20 nt, Artificial Sequence
  Synthetic
cacacugacuacaugcugau

SEQ ID NO: 815088 - RNA, 20 nt, Artificial Sequence
  Synthetic
uaaaauuucacugugcugau

SEQ ID NO: 815089 - RNA, 20 nt, Artificial Sequence
  Synthetic
auaagaaauuucaaucugau

SEQ ID NO: 815090 - RNA, 20 nt, Artificial Sequence
  Synthetic
aaauacaaauggaaucugau

SEQ ID NO: 815091 - RNA, 20 nt, Artificial Sequence
  Synthetic
auaaaauacuggaaucugau

SEQ ID NO: 815092 - RNA, 20 nt, Artificial Sequence
  Synthetic
uucuauauuugacaucugau

SEQ ID NO: 815093 - RNA, 20 nt, Artificial Sequence
  Synthetic
ugaaaaaagggcacucugau

SEQ ID NO: 815094 - RNA, 20 nt, Artificial Sequence
  Synthetic
aguuaaauaaauacucugau

SEQ ID NO: 815095 - RNA, 20 nt, Artificial Sequence
  Synthetic
cccaaccuccacccucugau

SEQ ID NO: 815096 - RNA, 20 nt, Artificial Sequence
  Synthetic
aauuuucauccugcucugau

SEQ ID NO: 815097 - RNA, 20 nt, Artificial Sequence
  Synthetic
ugauccacuguuagucugau

SEQ ID NO: 815098 - RNA, 20 nt, Artificial Sequence
  Synthetic
agauccgcuguuagucugau

SEQ ID NO: 815099 - RNA, 20 nt, Artificial Sequence
  Synthetic
ugauccgcuguuagucugau

SEQ ID NO: 815100 - RNA, 20 nt, Artificial Sequence
  Synthetic
agaccaaaucuacgucugau

SEQ ID NO: 815101 - RNA, 20 nt, Artificial Sequence
  Synthetic
cucccaagcugaguucugau

SEQ ID NO: 815102 - RNA, 20 nt, Artificial Sequence
  Synthetic
uaagaucaaagauuucugau

SEQ ID NO: 815103 - RNA, 20 nt, Artificial Sequence
  Synthetic
uccuuagcccacuuucugau

SEQ ID NO: 815104 - RNA, 20 nt, Artificial Sequence
  Synthetic
uccuuugcccacuuucugau

SEQ ID NO: 815105 - RNA, 20 nt, Artificial Sequence
  Synthetic
cugaguguuagcaaagugau

SEQ ID NO: 815106 - RNA, 20 nt, Artificial Sequence
  Synthetic
uugguguaccugaaagugau

SEQ ID NO: 815107 - RNA, 20 nt, Artificial Sequence
  Synthetic
uaauuaugguggcaagugau

SEQ ID NO: 815108 - RNA, 20 nt, Artificial Sequence
  Synthetic
uauuauuuuauggaagugau

SEQ ID NO: 815109 - RNA, 20 nt, Artificial Sequence
  Synthetic
uugagagauucugaagugau

SEQ ID NO: 815110 - RNA, 20 nt, Artificial Sequence
  Synthetic
acaauagggugaacagugau

SEQ ID NO: 815111 - RNA, 20 nt, Artificial Sequence
  Synthetic
uaagaucaguagacagugau

SEQ ID NO: 815112 - RNA, 20 nt, Artificial Sequence
  Synthetic
cuuugugaaacagcagugau

SEQ ID NO: 815113 - RNA, 20 nt, Artificial Sequence
  Synthetic
uagaucuuaaaggcagugau

SEQ ID NO: 815114 - RNA, 20 nt, Artificial Sequence
  Synthetic
ucccaucaaaaugucgugau

SEQ ID NO: 815115 - RNA, 20 nt, Artificial Sequence
  Synthetic
aagauaguauuugaggugau

SEQ ID NO: 815116 - RNA, 20 nt, Artificial Sequence
  Synthetic
uauauauaucucuaggugau

SEQ ID NO: 815117 - RNA, 20 nt, Artificial Sequence
  Synthetic
ugacuaaaauucagggugau

SEQ ID NO: 815118 - RNA, 20 nt, Artificial Sequence
  Synthetic
augcucacugccugggugau

SEQ ID NO: 815119 - RNA, 20 nt, Artificial Sequence
  Synthetic
cacguccagugcugggugau

SEQ ID NO: 815120 - RNA, 20 nt, Artificial Sequence
  Synthetic
uuuauaacuguuauggugau

SEQ ID NO: 815121 - RNA, 20 nt, Artificial Sequence
  Synthetic
uaacuaugugauuuggugau

SEQ ID NO: 815122 - RNA, 20 nt, Artificial Sequence
  Synthetic
agugaaaggaaaaaugugau

SEQ ID NO: 815123 - RNA, 20 nt, Artificial Sequence
  Synthetic
uauguacuaacaaaugugau

SEQ ID NO: 815124 - RNA, 20 nt, Artificial Sequence
  Synthetic
caggcaugagccaaugugau

SEQ ID NO: 815125 - RNA, 20 nt, Artificial Sequence
  Synthetic
cugguaauaguagaugugau

SEQ ID NO: 815126 - RNA, 20 nt, Artificial Sequence
  Synthetic
augauauuccucuaugugau

SEQ ID NO: 815127 - RNA, 20 nt, Artificial Sequence
  Synthetic
auugguucuguuuaugugau

SEQ ID NO: 815128 - RNA, 20 nt, Artificial Sequence
  Synthetic
aacauuccuggggcugugau

SEQ ID NO: 815129 - RNA, 20 nt, Artificial Sequence
  Synthetic
aacuuguucuagucugugau

SEQ ID NO: 815130 - RNA, 20 nt, Artificial Sequence
  Synthetic
uagaccucugggucugugau

SEQ ID NO: 815131 - RNA, 20 nt, Artificial Sequence
  Synthetic
aauuccuauccuucugugau

SEQ ID NO: 815132 - RNA, 20 nt, Artificial Sequence
  Synthetic
ucaguaaaacuuucugugau

SEQ ID NO: 815133 - RNA, 20 nt, Artificial Sequence
  Synthetic
aauaacuaaaggagugugau

SEQ ID NO: 815134 - RNA, 20 nt, Artificial Sequence
  Synthetic
cagggccugguaggugugau

SEQ ID NO: 815135 - RNA, 20 nt, Artificial Sequence
  Synthetic
aauguuccuugacuugugau

SEQ ID NO: 815136 - RNA, 20 nt, Artificial Sequence
  Synthetic
uaggccucugggcuugugau

SEQ ID NO: 815137 - RNA, 20 nt, Artificial Sequence
  Synthetic
aaagaauguuuaguugugau

SEQ ID NO: 815138 - RNA, 20 nt, Artificial Sequence
  Synthetic
aaaaauuuaguguuugugau

SEQ ID NO: 815139 - RNA, 20 nt, Artificial Sequence
  Synthetic
aaacaucauaaaaaauugau

SEQ ID NO: 815140 - RNA, 20 nt, Artificial Sequence
  Synthetic
uuuuauguuccaaaauugau

SEQ ID NO: 815141 - RNA, 20 nt, Artificial Sequence
  Synthetic
uuaaggacuucaaaauugau

SEQ ID NO: 815142 - RNA, 20 nt, Artificial Sequence
  Synthetic
aaaccuccuuccaaauugau

SEQ ID NO: 815143 - RNA, 20 nt, Artificial Sequence
  Synthetic
uugcucaauaggaaauugau

SEQ ID NO: 815144 - RNA, 20 nt, Artificial Sequence
  Synthetic
ucuugugauaggaaauugau

SEQ ID NO: 815145 - RNA, 20 nt, Artificial Sequence
  Synthetic
uggcugauaacuaaauugau

SEQ ID NO: 815146 - RNA, 20 nt, Artificial Sequence
  Synthetic
auagcccuggaagaauugau

SEQ ID NO: 815147 - RNA, 20 nt, Artificial Sequence
  Synthetic
uccagagagcucuaauugau

SEQ ID NO: 815148 - RNA, 20 nt, Artificial Sequence
  Synthetic
auaucugaucuaccauugau

SEQ ID NO: 815149 - RNA, 20 nt, Artificial Sequence
  Synthetic
uaauccaguauaucauugau

SEQ ID NO: 815150 - RNA, 20 nt, Artificial Sequence
  Synthetic
uuauccagucuaucauugau

SEQ ID NO: 815151 - RNA, 20 nt, Artificial Sequence
  Synthetic
uauucagucuguucauugau

SEQ ID NO: 815152 - RNA, 20 nt, Artificial Sequence
  Synthetic
aaucugaaucacagauugau

SEQ ID NO: 815153 - RNA, 20 nt, Artificial Sequence
  Synthetic
uuaucuacuugucgauugau

SEQ ID NO: 815154 - RNA, 20 nt, Artificial Sequence
  Synthetic
uacucaguaaugggauugau

SEQ ID NO: 815155 - RNA, 20 nt, Artificial Sequence
  Synthetic
auaaauacuuacugauugau

SEQ ID NO: 815156 - RNA, 20 nt, Artificial Sequence
  Synthetic
cauucaaaguaaauauugau

SEQ ID NO: 815157 - RNA, 20 nt, Artificial Sequence
  Synthetic
uaacaaaaaacaauauugau

SEQ ID NO: 815158 - RNA, 20 nt, Artificial Sequence
  Synthetic
aggaagguguauauauugau

SEQ ID NO: 815159 - RNA, 20 nt, Artificial Sequence
  Synthetic
agaacucuuugacuauugau

SEQ ID NO: 815160 - RNA, 20 nt, Artificial Sequence
  Synthetic
uuuuauuuuguucuauugau

SEQ ID NO: 815161 - RNA, 20 nt, Artificial Sequence
  Synthetic
uucccucuuuuucuauugau

SEQ ID NO: 815162 - RNA, 20 nt, Artificial Sequence
  Synthetic
ucaauaaauuagguauugau

SEQ ID NO: 815163 - RNA, 20 nt, Artificial Sequence
  Synthetic
ucgauaaauuagguauugau

SEQ ID NO: 815164 - RNA, 20 nt, Artificial Sequence
  Synthetic
ucuguaagucaauuauugau

SEQ ID NO: 815165 - RNA, 20 nt, Artificial Sequence
  Synthetic
ucaauaaacuaguuauugau

SEQ ID NO: 815166 - RNA, 20 nt, Artificial Sequence
  Synthetic
aaaucaauuuuuuuauugau

SEQ ID NO: 815167 - RNA, 20 nt, Artificial Sequence
  Synthetic
uucugaaagauacacuugau

SEQ ID NO: 815168 - RNA, 20 nt, Artificial Sequence
  Synthetic
aaggacuggcaggacuugau

SEQ ID NO: 815169 - RNA, 20 nt, Artificial Sequence
  Synthetic
cuucuucuuaucuacuugau

SEQ ID NO: 815170 - RNA, 20 nt, Artificial Sequence
  Synthetic
aaagucaaugguagcuugau

SEQ ID NO: 815171 - RNA, 20 nt, Artificial Sequence
  Synthetic
aaaggcauugguagcuugau

SEQ ID NO: 815172 - RNA, 20 nt, Artificial Sequence
  Synthetic
aaagucauugguagcuugau

SEQ ID NO: 815173 - RNA, 20 nt, Artificial Sequence
  Synthetic
cuaauuuaaauuagcuugau

SEQ ID NO: 815174 - RNA, 20 nt, Artificial Sequence
  Synthetic
auaguuuaggaaugcuugau

SEQ ID NO: 815175 - RNA, 20 nt, Artificial Sequence
  Synthetic
caguagcaaaucaucuugau

SEQ ID NO: 815176 - RNA, 20 nt, Artificial Sequence
  Synthetic
uagcuuagggauaucuugau

SEQ ID NO: 815177 - RNA, 20 nt, Artificial Sequence
  Synthetic
uaaacaauacuauucuugau

SEQ ID NO: 815178 - RNA, 20 nt, Artificial Sequence
  Synthetic
acaacaaaccauuucuugau

SEQ ID NO: 815179 - RNA, 20 nt, Artificial Sequence
  Synthetic
uauauauauaucaaguugau

SEQ ID NO: 815180 - RNA, 20 nt, Artificial Sequence
  Synthetic
uuuuuuguugaagaguugau

SEQ ID NO: 815181 - RNA, 20 nt, Artificial Sequence
  Synthetic
aauguagaugacagguugau

SEQ ID NO: 815182 - RNA, 20 nt, Artificial Sequence
  Synthetic
aauguagaugaaggguugau

SEQ ID NO: 815183 - RNA, 20 nt, Artificial Sequence
  Synthetic
aaccuagaugacggguugau

SEQ ID NO: 815184 - RNA, 20 nt, Artificial Sequence
  Synthetic
aauguagaugacggguugau

SEQ ID NO: 815185 - RNA, 20 nt, Artificial Sequence
  Synthetic
aacccuuguacaauguugau

SEQ ID NO: 815186 - RNA, 20 nt, Artificial Sequence
  Synthetic
aauguaugcaaucuguugau

SEQ ID NO: 815187 - RNA, 20 nt, Artificial Sequence
  Synthetic
uuuaaagucuaucuguugau

SEQ ID NO: 815188 - RNA, 20 nt, Artificial Sequence
  Synthetic
uugaugauaauacauuugau

SEQ ID NO: 815189 - RNA, 20 nt, Artificial Sequence
  Synthetic
agaccaaaccuacauuugau

SEQ ID NO: 815190 - RNA, 20 nt, Artificial Sequence
  Synthetic
aucaaaaagaaagauuugau

SEQ ID NO: 815191 - RNA, 20 nt, Artificial Sequence
  Synthetic
cuguucacaaaggauuugau

SEQ ID NO: 815192 - RNA, 20 nt, Artificial Sequence
  Synthetic
auagaaugugaauauuugau

SEQ ID NO: 815193 - RNA, 20 nt, Artificial Sequence
  Synthetic
cacguaaacaaggcuuugau

SEQ ID NO: 815194 - RNA, 20 nt, Artificial Sequence
  Synthetic
uuaucacccauaaguuugau

SEQ ID NO: 815195 - RNA, 20 nt, Artificial Sequence
  Synthetic
aaugacauugcuaguuugau

SEQ ID NO: 815196 - RNA, 20 nt, Artificial Sequence
  Synthetic
aauauaaaauacuguuugau

SEQ ID NO: 815197 - RNA, 20 nt, Artificial Sequence
  Synthetic
aacuuuauguacuguuugau

SEQ ID NO: 815198 - RNA, 20 nt, Artificial Sequence
  Synthetic
uucauuuguucuuguuugau

SEQ ID NO: 815199 - RNA, 20 nt, Artificial Sequence
  Synthetic
ucuccuuuuuaccuuuugau

SEQ ID NO: 815200 - RNA, 20 nt, Artificial Sequence
  Synthetic
ugguuuuucucccuuuugau

SEQ ID NO: 815201 - RNA, 20 nt, Artificial Sequence
  Synthetic
accacucuaugccuuuugau

SEQ ID NO: 815202 - RNA, 20 nt, Artificial Sequence
  Synthetic
uccuucacccacuuuuugau

SEQ ID NO: 815203 - RNA, 20 nt, Artificial Sequence
  Synthetic
uccuucccccacuuuuugau

SEQ ID NO: 815204 - RNA, 20 nt, Artificial Sequence
  Synthetic
uccuucgcccacuuuuugau

SEQ ID NO: 815205 - RNA, 20 nt, Artificial Sequence
  Synthetic
uccuucgcucacuuuuugau

SEQ ID NO: 815206 - RNA, 20 nt, Artificial Sequence
  Synthetic
ccuccuucuagguuuuugau

SEQ ID NO: 815207 - RNA, 20 nt, Artificial Sequence
  Synthetic
uuuugcccauuuuuuuugau

SEQ ID NO: 815208 - RNA, 20 nt, Artificial Sequence
  Synthetic
auuucuuauuuuuuuuugau

SEQ ID NO: 815209 - RNA, 20 nt, Artificial Sequence
  Synthetic
auacaaauggcaaaaaauau

SEQ ID NO: 815210 - RNA, 20 nt, Artificial Sequence
  Synthetic
cacauuuagggaaaaaauau

SEQ ID NO: 815211 - RNA, 20 nt, Artificial Sequence
  Synthetic
augugagauggaaaaaauau

SEQ ID NO: 815212 - RNA, 20 nt, Artificial Sequence
  Synthetic
auagaagcuuuaaaaaauau

SEQ ID NO: 815213 - RNA, 20 nt, Artificial Sequence
  Synthetic
uugauuuuauucaaaaauau

SEQ ID NO: 815214 - RNA, 20 nt, Artificial Sequence
  Synthetic
aaacuauccuucaaaaauau

SEQ ID NO: 815215 - RNA, 20 nt, Artificial Sequence
  Synthetic
agaagaaucuagaaaaauau

SEQ ID NO: 815216 - RNA, 20 nt, Artificial Sequence
  Synthetic
uuauagaauuugaaaaauau

SEQ ID NO: 815217 - RNA, 20 nt, Artificial Sequence
  Synthetic
auuacuguaauuaaaaauau

SEQ ID NO: 815218 - RNA, 20 nt, Artificial Sequence
  Synthetic
aggguugacaaacaaaauau

SEQ ID NO: 815219 - RNA, 20 nt, Artificial Sequence
  Synthetic
uaaauccaaaaccaaaauau

SEQ ID NO: 815220 - RNA, 20 nt, Artificial Sequence
  Synthetic
auuuuucagacagaaaauau

SEQ ID NO: 815221 - RNA, 20 nt, Artificial Sequence
  Synthetic
aguuugggaguagaaaauau

SEQ ID NO: 815222 - RNA, 20 nt, Artificial Sequence
  Synthetic
uaagagaauuaggaaaauau

SEQ ID NO: 815223 - RNA, 20 nt, Artificial Sequence
  Synthetic
uggcuccacauggaaaauau

SEQ ID NO: 815224 - RNA, 20 nt, Artificial Sequence
  Synthetic
uauaaaaguaaugaaaauau

SEQ ID NO: 815225 - RNA, 20 nt, Artificial Sequence
  Synthetic
uuucagugccaugaaaauau

SEQ ID NO: 815226 - RNA, 20 nt, Artificial Sequence
  Synthetic
cuguucuugggugaaaauau

SEQ ID NO: 815227 - RNA, 20 nt, Artificial Sequence
  Synthetic
cauggcuaaaaauaaaauau

SEQ ID NO: 815228 - RNA, 20 nt, Artificial Sequence
  Synthetic
uauaaaaagaaauaaaauau

SEQ ID NO: 815229 - RNA, 20 nt, Artificial Sequence
  Synthetic
agcccaaggcccuaaaauau

SEQ ID NO: 815230 - RNA, 20 nt, Artificial Sequence
  Synthetic
aauuuguuauguuaaaauau

SEQ ID NO: 815231 - RNA, 20 nt, Artificial Sequence
  Synthetic
aaagucauagacacaaauau

SEQ ID NO: 815232 - RNA, 20 nt, Artificial Sequence
  Synthetic
cuuucaucuacagcaaauau

SEQ ID NO: 815233 - RNA, 20 nt, Artificial Sequence
  Synthetic
cccaacccugagucaaauau

SEQ ID NO: 815234 - RNA, 20 nt, Artificial Sequence
  Synthetic
acaaagccuucaagaaauau

SEQ ID NO: 815235 - RNA, 20 nt, Artificial Sequence
  Synthetic
aaaacaaaaagcagaaauau

SEQ ID NO: 815236 - RNA, 20 nt, Artificial Sequence
  Synthetic
auuccaccccucagaaauau

SEQ ID NO: 815237 - RNA, 20 nt, Artificial Sequence
  Synthetic
aauauauuuuucagaaauau

SEQ ID NO: 815238 - RNA, 20 nt, Artificial Sequence
  Synthetic
uuuggaaucaagagaaauau

SEQ ID NO: 815239 - RNA, 20 nt, Artificial Sequence
  Synthetic
aguuagggugggggaaauau

SEQ ID NO: 815240 - RNA, 20 nt, Artificial Sequence
  Synthetic
ugauaauacaggugaaauau

SEQ ID NO: 815241 - RNA, 20 nt, Artificial Sequence
  Synthetic
acacaauaauggugaaauau

SEQ ID NO: 815242 - RNA, 20 nt, Artificial Sequence
  Synthetic
ugaaacuaugcuugaaauau

SEQ ID NO: 815243 - RNA, 20 nt, Artificial Sequence
  Synthetic
auggcuucuguuugaaauau

SEQ ID NO: 815244 - RNA, 20 nt, Artificial Sequence
  Synthetic
aaucuugaagauauaaauau

SEQ ID NO: 815245 - RNA, 20 nt, Artificial Sequence
  Synthetic
uaagauuagugacuaaauau

SEQ ID NO: 815246 - RNA, 20 nt, Artificial Sequence
  Synthetic
acgaauggccauguaaauau

SEQ ID NO: 815247 - RNA, 20 nt, Artificial Sequence
  Synthetic
cuuucaaaagguuuaaauau

SEQ ID NO: 815248 - RNA, 20 nt, Artificial Sequence
  Synthetic
aaaaucauuauuuuaaauau

SEQ ID NO: 815249 - RNA, 20 nt, Artificial Sequence
  Synthetic
ucuuuuuccuuuuuaaauau

SEQ ID NO: 815250 - RNA, 20 nt, Artificial Sequence
  Synthetic
cuaaaggaagagaacaauau

SEQ ID NO: 815251 - RNA, 20 nt, Artificial Sequence
  Synthetic
aaauguaaaucuaacaauau

SEQ ID NO: 815252 - RNA, 20 nt, Artificial Sequence
  Synthetic
ugaaauauacagcacaauau

SEQ ID NO: 815253 - RNA, 20 nt, Artificial Sequence
  Synthetic
agugaaaaugaagacaauau

SEQ ID NO: 815254 - RNA, 20 nt, Artificial Sequence
  Synthetic
agaaaauaagcauacaauau

SEQ ID NO: 815255 - RNA, 20 nt, Artificial Sequence
  Synthetic
ugaaguaaauuauacaauau

SEQ ID NO: 815256 - RNA, 20 nt, Artificial Sequence
  Synthetic
aauauauaugcacccaauau

SEQ ID NO: 815257 - RNA, 20 nt, Artificial Sequence
  Synthetic
aaaaugaaacacagcaauau

SEQ ID NO: 815258 - RNA, 20 nt, Artificial Sequence
  Synthetic
aaauucaugaaaggcaauau

SEQ ID NO: 815259 - RNA, 20 nt, Artificial Sequence
  Synthetic
cagcccucuucaaucaauau

SEQ ID NO: 815260 - RNA, 20 nt, Artificial Sequence
  Synthetic
aggagcaccuguaucaauau

SEQ ID NO: 815261 - RNA, 20 nt, Artificial Sequence
  Synthetic
ugaaauuugauccucaauau

SEQ ID NO: 815262 - RNA, 20 nt, Artificial Sequence
  Synthetic
ccaauucaacaauucaauau

SEQ ID NO: 815263 - RNA, 20 nt, Artificial Sequence
  Synthetic
auuucuucaagauucaauau

SEQ ID NO: 815264 - RNA, 20 nt, Artificial Sequence
  Synthetic
acauuuucaaauuucaauau

SEQ ID NO: 815265 - RNA, 20 nt, Artificial Sequence
  Synthetic
caauagcuagagaagaauau

SEQ ID NO: 815266 - RNA, 20 nt, Artificial Sequence
  Synthetic
aacgcugaaucucagaauau

SEQ ID NO: 815267 - RNA, 20 nt, Artificial Sequence
  Synthetic
caauuagagaaggagaauau

SEQ ID NO: 815268 - RNA, 20 nt, Artificial Sequence
  Synthetic
cugauugacaaauagaauau

SEQ ID NO: 815269 - RNA, 20 nt, Artificial Sequence
  Synthetic
uucaaaugcucauagaauau

SEQ ID NO: 815270 - RNA, 20 nt, Artificial Sequence
  Synthetic
uuaaggaauuacuagaauau

SEQ ID NO: 815271 - RNA, 20 nt, Artificial Sequence
  Synthetic
auauugaauguuuagaauau

SEQ ID NO: 815272 - RNA, 20 nt, Artificial Sequence
  Synthetic
aaagggaauggaaggaauau

SEQ ID NO: 815273 - RNA, 20 nt, Artificial Sequence
  Synthetic
uaguaaccuuggaggaauau

SEQ ID NO: 815274 - RNA, 20 nt, Artificial Sequence
  Synthetic
uaucuauuuaauaggaauau

SEQ ID NO: 815275 - RNA, 20 nt, Artificial Sequence
  Synthetic
ucccuggaugcuaggaauau

SEQ ID NO: 815276 - RNA, 20 nt, Artificial Sequence
  Synthetic
ugguacagguuggggaauau

SEQ ID NO: 815277 - RNA, 20 nt, Artificial Sequence
  Synthetic
cccaggugccucaugaauau

SEQ ID NO: 815278 - RNA, 20 nt, Artificial Sequence
  Synthetic
cuauucaaaucacugaauau

SEQ ID NO: 815279 - RNA, 20 nt, Artificial Sequence
  Synthetic
uucaaauguccccugaauau

SEQ ID NO: 815280 - RNA, 20 nt, Artificial Sequence
  Synthetic
uuucccuaaucccugaauau

SEQ ID NO: 815281 - RNA, 20 nt, Artificial Sequence
  Synthetic
aacuucuucaggcugaauau

SEQ ID NO: 815282 - RNA, 20 nt, Artificial Sequence
  Synthetic
auugauauggccgugaauau

SEQ ID NO: 815283 - RNA, 20 nt, Artificial Sequence
  Synthetic
auucaugaaggcuugaauau

SEQ ID NO: 815284 - RNA, 20 nt, Artificial Sequence
  Synthetic
aaaauuuuaagguugaauau

SEQ ID NO: 815285 - RNA, 20 nt, Artificial Sequence
  Synthetic
ucuuuaagaauguugaauau

SEQ ID NO: 815286 - RNA, 20 nt, Artificial Sequence
  Synthetic
uauugaagaguguugaauau

SEQ ID NO: 815287 - RNA, 20 nt, Artificial Sequence
  Synthetic
aaauaaucauguuugaauau

SEQ ID NO: 815288 - RNA, 20 nt, Artificial Sequence
  Synthetic
ugccacuuagaaaauaauau

SEQ ID NO: 815289 - RNA, 20 nt, Artificial Sequence
  Synthetic
ucagaauaugcaaauaauau

SEQ ID NO: 815290 - RNA, 20 nt, Artificial Sequence
  Synthetic
cuuuagaaaauaaauaauau

SEQ ID NO: 815291 - RNA, 20 nt, Artificial Sequence
  Synthetic
acaaauacuaggaauaauau

SEQ ID NO: 815292 - RNA, 20 nt, Artificial Sequence
  Synthetic
acaugaaacaugaauaauau

SEQ ID NO: 815293 - RNA, 20 nt, Artificial Sequence
  Synthetic
ccuuaucucaguaauaauau

SEQ ID NO: 815294 - RNA, 20 nt, Artificial Sequence
  Synthetic
acagggguauuuaauaauau

SEQ ID NO: 815295 - RNA, 20 nt, Artificial Sequence
  Synthetic
caaagguauuuuaauaauau

SEQ ID NO: 815296 - RNA, 20 nt, Artificial Sequence
  Synthetic
uuuguugugaaacauaauau

SEQ ID NO: 815297 - RNA, 20 nt, Artificial Sequence
  Synthetic
acucguauucaacauaauau

SEQ ID NO: 815298 - RNA, 20 nt, Artificial Sequence
  Synthetic
uauauuguuagccauaauau

SEQ ID NO: 815299 - RNA, 20 nt, Artificial Sequence
  Synthetic
agucuaugcuuccauaauau

SEQ ID NO: 815300 - RNA, 20 nt, Artificial Sequence
  Synthetic
augauaguaugauauaauau

SEQ ID NO: 815301 - RNA, 20 nt, Artificial Sequence
  Synthetic
uugaccuucgucuauaauau

SEQ ID NO: 815302 - RNA, 20 nt, Artificial Sequence
  Synthetic
aggagaaaaugguauaauau

SEQ ID NO: 815303 - RNA, 20 nt, Artificial Sequence
  Synthetic
uguaaguucuuuuauaauau

SEQ ID NO: 815304 - RNA, 20 nt, Artificial Sequence
  Synthetic
ugugugccacauacuaauau

SEQ ID NO: 815305 - RNA, 20 nt, Artificial Sequence
  Synthetic
aucaaaagaugagcuaauau

SEQ ID NO: 815306 - RNA, 20 nt, Artificial Sequence
  Synthetic
aacauugcuugaaguaauau

SEQ ID NO: 815307 - RNA, 20 nt, Artificial Sequence
  Synthetic
cucuauaaaacuaguaauau

SEQ ID NO: 815308 - RNA, 20 nt, Artificial Sequence
  Synthetic
uuacauuuuaaaauuaauau

SEQ ID NO: 815309 - RNA, 20 nt, Artificial Sequence
  Synthetic
ugaggucuggauauuaauau

SEQ ID NO: 815310 - RNA, 20 nt, Artificial Sequence
  Synthetic
cauuaggagauuauuaauau

SEQ ID NO: 815311 - RNA, 20 nt, Artificial Sequence
  Synthetic
aagcuuuugccacuuaauau

SEQ ID NO: 815312 - RNA, 20 nt, Artificial Sequence
  Synthetic
ucauuguuuugccuuaauau

SEQ ID NO: 815313 - RNA, 20 nt, Artificial Sequence
  Synthetic
uaagaaugaaugcuuaauau

SEQ ID NO: 815314 - RNA, 20 nt, Artificial Sequence
  Synthetic
acuaauuaccaucuuaauau

SEQ ID NO: 815315 - RNA, 20 nt, Artificial Sequence
  Synthetic
aaucaauuaacuguuaauau

SEQ ID NO: 815316 - RNA, 20 nt, Artificial Sequence
  Synthetic
auauaacaaaccuuuaauau

SEQ ID NO: 815317 - RNA, 20 nt, Artificial Sequence
  Synthetic
cuuuacagcaaguuuaauau

SEQ ID NO: 815318 - RNA, 20 nt, Artificial Sequence
  Synthetic
uaguuccugguuuuuaauau

SEQ ID NO: 815319 - RNA, 20 nt, Artificial Sequence
  Synthetic
ucaauuaaguucaaacauau

SEQ ID NO: 815320 - RNA, 20 nt, Artificial Sequence
  Synthetic
augacaaagaaugaacauau

SEQ ID NO: 815321 - RNA, 20 nt, Artificial Sequence
  Synthetic
ugaaugcaaggauaacauau

SEQ ID NO: 815322 - RNA, 20 nt, Artificial Sequence
  Synthetic
ugaaggaaaugaccacauau

SEQ ID NO: 815323 - RNA, 20 nt, Artificial Sequence
  Synthetic
ucaggaugcauaccacauau

SEQ ID NO: 815324 - RNA, 20 nt, Artificial Sequence
  Synthetic
uuagucauacuuccacauau

SEQ ID NO: 815325 - RNA, 20 nt, Artificial Sequence
  Synthetic
cucucuaucucagcacauau

SEQ ID NO: 815326 - RNA, 20 nt, Artificial Sequence
  Synthetic
aguuuuaagugugcacauau

SEQ ID NO: 815327 - RNA, 20 nt, Artificial Sequence
  Synthetic
uuuaaagccauugcacauau

SEQ ID NO: 815328 - RNA, 20 nt, Artificial Sequence
  Synthetic
aucccaggacauucacauau

SEQ ID NO: 815329 - RNA, 20 nt, Artificial Sequence
  Synthetic
uuaaaaauguuuggacauau

SEQ ID NO: 815330 - RNA, 20 nt, Artificial Sequence
  Synthetic
acuuggcacuacugacauau

SEQ ID NO: 815331 - RNA, 20 nt, Artificial Sequence
  Synthetic
uugaggucucagugacauau

SEQ ID NO: 815332 - RNA, 20 nt, Artificial Sequence
  Synthetic
auaugcuguaaaauacauau

SEQ ID NO: 815333 - RNA, 20 nt, Artificial Sequence
  Synthetic
ugaaaaagaccaauacauau

SEQ ID NO: 815334 - RNA, 20 nt, Artificial Sequence
  Synthetic
uagaguaucaggauacauau

SEQ ID NO: 815335 - RNA, 20 nt, Artificial Sequence
  Synthetic
cauacuuuaaauauacauau

SEQ ID NO: 815336 - RNA, 20 nt, Artificial Sequence
  Synthetic
ugugcacauuugcuacauau

SEQ ID NO: 815337 - RNA, 20 nt, Artificial Sequence
  Synthetic
uauucacaaaauuuacauau

SEQ ID NO: 815338 - RNA, 20 nt, Artificial Sequence
  Synthetic
aucaucaccuaaaaccauau

SEQ ID NO: 815339 - RNA, 20 nt, Artificial Sequence
  Synthetic
ucucccauuuuagaccauau

SEQ ID NO: 815340 - RNA, 20 nt, Artificial Sequence
  Synthetic
uauguacuauaauaccauau

SEQ ID NO: 815341 - RNA, 20 nt, Artificial Sequence
  Synthetic
uccuuaacauuauaccauau

SEQ ID NO: 815342 - RNA, 20 nt, Artificial Sequence
  Synthetic
ucaauucauguuucccauau

SEQ ID NO: 815343 - RNA, 20 nt, Artificial Sequence
  Synthetic
auuauacacgagagccauau

SEQ ID NO: 815344 - RNA, 20 nt, Artificial Sequence
  Synthetic
aguauuaguuugagccauau

SEQ ID NO: 815345 - RNA, 20 nt, Artificial Sequence
  Synthetic
ccucaaugucuuagccauau

SEQ ID NO: 815346 - RNA, 20 nt, Artificial Sequence
  Synthetic
ucaagccacagaugccauau

SEQ ID NO: 815347 - RNA, 20 nt, Artificial Sequence
  Synthetic
uuucagauagugauccauau

SEQ ID NO: 815348 - RNA, 20 nt, Artificial Sequence
  Synthetic
uugacaucaaagcuccauau

SEQ ID NO: 815349 - RNA, 20 nt, Artificial Sequence
  Synthetic
aaacauuauuccuuccauau

SEQ ID NO: 815350 - RNA, 20 nt, Artificial Sequence
  Synthetic
caugucuauuucuuccauau

SEQ ID NO: 815351 - RNA, 20 nt, Artificial Sequence
  Synthetic
aacacuucaguuuuccauau

SEQ ID NO: 815352 - RNA, 20 nt, Artificial Sequence
  Synthetic
uguaaagagugaaagcauau

SEQ ID NO: 815353 - RNA, 20 nt, Artificial Sequence
  Synthetic
cuaagcuuauacaagcauau

SEQ ID NO: 815354 - RNA, 20 nt, Artificial Sequence
  Synthetic
ugcucugacuacaagcauau

SEQ ID NO: 815355 - RNA, 20 nt, Artificial Sequence
  Synthetic
agauagauagcauagcauau

SEQ ID NO: 815356 - RNA, 20 nt, Artificial Sequence
  Synthetic
aguggaauugaagggcauau

SEQ ID NO: 815357 - RNA, 20 nt, Artificial Sequence
  Synthetic
uuuacuuuuguauggcauau

SEQ ID NO: 815358 - RNA, 20 nt, Artificial Sequence
  Synthetic
cucaaugugaacaugcauau

SEQ ID NO: 815359 - RNA, 20 nt, Artificial Sequence
  Synthetic
cgaauuuuaaaccugcauau

SEQ ID NO: 815360 - RNA, 20 nt, Artificial Sequence
  Synthetic
cccuucacacacgugcauau

SEQ ID NO: 815361 - RNA, 20 nt, Artificial Sequence
  Synthetic
uauuuguuguaugugcauau

SEQ ID NO: 815362 - RNA, 20 nt, Artificial Sequence
  Synthetic
auauauguaucugugcauau

SEQ ID NO: 815363 - RNA, 20 nt, Artificial Sequence
  Synthetic
cacauggacaaaaaucauau

SEQ ID NO: 815364 - RNA, 20 nt, Artificial Sequence
  Synthetic
uauucaaauauaaaucauau

SEQ ID NO: 815365 - RNA, 20 nt, Artificial Sequence
  Synthetic
uacagaaccuaacaucauau

SEQ ID NO: 815366 - RNA, 20 nt, Artificial Sequence
  Synthetic
uucucaaucacucaucauau

SEQ ID NO: 815367 - RNA, 20 nt, Artificial Sequence
  Synthetic
cauauauauauauaucauau

SEQ ID NO: 815368 - RNA, 20 nt, Artificial Sequence
  Synthetic
aaagucuaccucuaucauau

SEQ ID NO: 815369 - RNA, 20 nt, Artificial Sequence
  Synthetic
ugaacaggcucuuaucauau

SEQ ID NO: 815370 - RNA, 20 nt, Artificial Sequence
  Synthetic
acugagaauaaaucucauau

SEQ ID NO: 815371 - RNA, 20 nt, Artificial Sequence
  Synthetic
uuuuaaggacagagucauau

SEQ ID NO: 815372 - RNA, 20 nt, Artificial Sequence
  Synthetic
acuuauauaacaugucauau

SEQ ID NO: 815373 - RNA, 20 nt, Artificial Sequence
  Synthetic
cagcuaucuuaaauucauau

SEQ ID NO: 815374 - RNA, 20 nt, Artificial Sequence
  Synthetic
aagguuaaaugaguucauau

SEQ ID NO: 815375 - RNA, 20 nt, Artificial Sequence
  Synthetic
aagcugagcuuaguucauau

SEQ ID NO: 815376 - RNA, 20 nt, Artificial Sequence
  Synthetic
uugugaacauaauuucauau

SEQ ID NO: 815377 - RNA, 20 nt, Artificial Sequence
  Synthetic
cauucuuuuucauuucauau

SEQ ID NO: 815378 - RNA, 20 nt, Artificial Sequence
  Synthetic
auccauaaauuaaaagauau

SEQ ID NO: 815379 - RNA, 20 nt, Artificial Sequence
  Synthetic
aauaaugaagguaaagauau

SEQ ID NO: 815380 - RNA, 20 nt, Artificial Sequence
  Synthetic
acaaauuauaaagaagauau

SEQ ID NO: 815381 - RNA, 20 nt, Artificial Sequence
  Synthetic
uauauaauucaagaagauau

SEQ ID NO: 815382 - RNA, 20 nt, Artificial Sequence
  Synthetic
caugagccaugauaagauau

SEQ ID NO: 815383 - RNA, 20 nt, Artificial Sequence
  Synthetic
acacuacuguccacagauau

SEQ ID NO: 815384 - RNA, 20 nt, Artificial Sequence
  Synthetic
caaagcaaugugacagauau

SEQ ID NO: 815385 - RNA, 20 nt, Artificial Sequence
  Synthetic
ucuuaaguuuguacagauau

SEQ ID NO: 815386 - RNA, 20 nt, Artificial Sequence
  Synthetic
aaucuugaagaaccagauau

SEQ ID NO: 815387 - RNA, 20 nt, Artificial Sequence
  Synthetic
ucuccuaagcacagagauau

SEQ ID NO: 815388 - RNA, 20 nt, Artificial Sequence
  Synthetic
uuugguagagacagagauau

SEQ ID NO: 815389 - RNA, 20 nt, Artificial Sequence
  Synthetic
uccuuuuuuuggugagauau

SEQ ID NO: 815390 - RNA, 20 nt, Artificial Sequence
  Synthetic
auaguagacacacuagauau

SEQ ID NO: 815391 - RNA, 20 nt, Artificial Sequence
  Synthetic
cugugucacccacuagauau

SEQ ID NO: 815392 - RNA, 20 nt, Artificial Sequence
  Synthetic
uuuccuggaaaucuagauau

SEQ ID NO: 815393 - RNA, 20 nt, Artificial Sequence
  Synthetic
aucuaauauaaauuagauau

SEQ ID NO: 815394 - RNA, 20 nt, Artificial Sequence
  Synthetic
cuuugaacuuaguuagauau

SEQ ID NO: 815395 - RNA, 20 nt, Artificial Sequence
  Synthetic
uugauuaauaguuuagauau

SEQ ID NO: 815396 - RNA, 20 nt, Artificial Sequence
  Synthetic
acagaaguuaaaagcgauau

SEQ ID NO: 815397 - RNA, 20 nt, Artificial Sequence
  Synthetic
ucaauguucaucaaggauau

SEQ ID NO: 815398 - RNA, 20 nt, Artificial Sequence
  Synthetic
caacaaugagagaaggauau

SEQ ID NO: 815399 - RNA, 20 nt, Artificial Sequence
  Synthetic
aaaggcacuuagaaggauau

SEQ ID NO: 815400 - RNA, 20 nt, Artificial Sequence
  Synthetic
uauucuggagaagaggauau

SEQ ID NO: 815401 - RNA, 20 nt, Artificial Sequence
  Synthetic
aaacagacuugugaggauau

SEQ ID NO: 815402 - RNA, 20 nt, Artificial Sequence
  Synthetic
cuucaccacagaagggauau

SEQ ID NO: 815403 - RNA, 20 nt, Artificial Sequence
  Synthetic
uugauguucaucagggauau

SEQ ID NO: 815404 - RNA, 20 nt, Artificial Sequence
  Synthetic
uuuucaagguagagggauau

SEQ ID NO: 815405 - RNA, 20 nt, Artificial Sequence
  Synthetic
aacauugagauacuggauau

SEQ ID NO: 815406 - RNA, 20 nt, Artificial Sequence
  Synthetic
aaaugucuugguuuggauau

SEQ ID NO: 815407 - RNA, 20 nt, Artificial Sequence
  Synthetic
aucccaagcauuuuggauau

SEQ ID NO: 815408 - RNA, 20 nt, Artificial Sequence
  Synthetic
caaauaguauuuaaugauau

SEQ ID NO: 815409 - RNA, 20 nt, Artificial Sequence
  Synthetic
uucucuuuccaacaugauau

SEQ ID NO: 815410 - RNA, 20 nt, Artificial Sequence
  Synthetic
auaaacaaaaggcaugauau

SEQ ID NO: 815411 - RNA, 20 nt, Artificial Sequence
  Synthetic
ccaaugucacugcaugauau

SEQ ID NO: 815412 - RNA, 20 nt, Artificial Sequence
  Synthetic
uugcccauucaguaugauau

SEQ ID NO: 815413 - RNA, 20 nt, Artificial Sequence
  Synthetic
aguaacaauauuacugauau

SEQ ID NO: 815414 - RNA, 20 nt, Artificial Sequence
  Synthetic
cacaaaagucacccugauau

SEQ ID NO: 815415 - RNA, 20 nt, Artificial Sequence
  Synthetic
cuuacuuuucucccugauau

SEQ ID NO: 815416 - RNA, 20 nt, Artificial Sequence
  Synthetic
caaaugaaccaaagugauau

SEQ ID NO: 815417 - RNA, 20 nt, Artificial Sequence
  Synthetic
auagcaaaagucagugauau

SEQ ID NO: 815418 - RNA, 20 nt, Artificial Sequence
  Synthetic
ucuaauuucauucgugauau

SEQ ID NO: 815419 - RNA, 20 nt, Artificial Sequence
  Synthetic
cugagguaggagggugauau

SEQ ID NO: 815420 - RNA, 20 nt, Artificial Sequence
  Synthetic
uugggaaaaaggggugauau

SEQ ID NO: 815421 - RNA, 20 nt, Artificial Sequence
  Synthetic
aauugccuuaucugugauau

SEQ ID NO: 815422 - RNA, 20 nt, Artificial Sequence
  Synthetic
augaaacaucgcauugauau

SEQ ID NO: 815423 - RNA, 20 nt, Artificial Sequence
  Synthetic
aacauagauuaacuugauau

SEQ ID NO: 815424 - RNA, 20 nt, Artificial Sequence
  Synthetic
accccuauacuauuugauau

SEQ ID NO: 815425 - RNA, 20 nt, Artificial Sequence
  Synthetic
uacaggaaauauuuugauau

SEQ ID NO: 815426 - RNA, 20 nt, Artificial Sequence
  Synthetic
uacaugagauauuuugauau

SEQ ID NO: 815427 - RNA, 20 nt, Artificial Sequence
  Synthetic
uacaugagauguuuugauau

SEQ ID NO: 815428 - RNA, 20 nt, Artificial Sequence
  Synthetic
uacaugagguguuuugauau

SEQ ID NO: 815429 - RNA, 20 nt, Artificial Sequence
  Synthetic
auucaaauuguaaaauauau

SEQ ID NO: 815430 - RNA, 20 nt, Artificial Sequence
  Synthetic
ucuucagcacccaaauauau

SEQ ID NO: 815431 - RNA, 20 nt, Artificial Sequence
  Synthetic
acaggaaacagcaaauauau

SEQ ID NO: 815432 - RNA, 20 nt, Artificial Sequence
  Synthetic
acuucaauaucuaaauauau

SEQ ID NO: 815433 - RNA, 20 nt, Artificial Sequence
  Synthetic
cuguaggaagguaaauauau

SEQ ID NO: 815434 - RNA, 20 nt, Artificial Sequence
  Synthetic
agagacaugaaacaauauau

SEQ ID NO: 815435 - RNA, 20 nt, Artificial Sequence
  Synthetic
ugaacagcacaggaauauau

SEQ ID NO: 815436 - RNA, 20 nt, Artificial Sequence
  Synthetic
cguguguuuguuuaauauau

SEQ ID NO: 815437 - RNA, 20 nt, Artificial Sequence
  Synthetic
ucucaagcuuuagcauauau

SEQ ID NO: 815438 - RNA, 20 nt, Artificial Sequence
  Synthetic
uuucuguaucucucauauau

SEQ ID NO: 815439 - RNA, 20 nt, Artificial Sequence
  Synthetic
aauguguauuauucauauau

SEQ ID NO: 815440 - RNA, 20 nt, Artificial Sequence
  Synthetic
aucuaguccucuucauauau

SEQ ID NO: 815441 - RNA, 20 nt, Artificial Sequence
  Synthetic
auccuaguaauaagauauau

SEQ ID NO: 815442 - RNA, 20 nt, Artificial Sequence
  Synthetic
uuauuacuuaacugauauau

SEQ ID NO: 815443 - RNA, 20 nt, Artificial Sequence
  Synthetic
aaauaauuaaaaauauauau

SEQ ID NO: 815444 - RNA, 20 nt, Artificial Sequence
  Synthetic
aacuaugaguccauauauau

SEQ ID NO: 815445 - RNA, 20 nt, Artificial Sequence
  Synthetic
ugugggguacauauauauau

SEQ ID NO: 815446 - RNA, 20 nt, Artificial Sequence
  Synthetic
ugggguacauauauauauau

SEQ ID NO: 815447 - RNA, 20 nt, Artificial Sequence
  Synthetic
ucuaaucugaaacuauauau

SEQ ID NO: 815448 - RNA, 20 nt, Artificial Sequence
  Synthetic
caagcauuccuaaacuauau

SEQ ID NO: 815449 - RNA, 20 nt, Artificial Sequence
  Synthetic
uugaagagcauauacuauau

SEQ ID NO: 815450 - RNA, 20 nt, Artificial Sequence
  Synthetic
aauauuauauuuuacuauau

SEQ ID NO: 815451 - RNA, 20 nt, Artificial Sequence
  Synthetic
uuaaguuugccauccuauau

SEQ ID NO: 815452 - RNA, 20 nt, Artificial Sequence
  Synthetic
auuuuuuuuaaaggcuauau

SEQ ID NO: 815453 - RNA, 20 nt, Artificial Sequence
  Synthetic
cagagauuuauaggcuauau

SEQ ID NO: 815454 - RNA, 20 nt, Artificial Sequence
  Synthetic
uaggauuuucuuggcuauau

SEQ ID NO: 815455 - RNA, 20 nt, Artificial Sequence
  Synthetic
uuaauauucaggugcuauau

SEQ ID NO: 815456 - RNA, 20 nt, Artificial Sequence
  Synthetic
aacuuagagaugcucuauau

SEQ ID NO: 815457 - RNA, 20 nt, Artificial Sequence
  Synthetic
uuguuuaaugauuucuauau

SEQ ID NO: 815458 - RNA, 20 nt, Artificial Sequence
  Synthetic
cccccaaauuauuucuauau

SEQ ID NO: 815459 - RNA, 20 nt, Artificial Sequence
  Synthetic
auucuuuuaacuuucuauau

SEQ ID NO: 815460 - RNA, 20 nt, Artificial Sequence
  Synthetic
uuccugcuaaguuucuauau

SEQ ID NO: 815461 - RNA, 20 nt, Artificial Sequence
  Synthetic
agagauguuuuaaaguauau

SEQ ID NO: 815462 - RNA, 20 nt, Artificial Sequence
  Synthetic
agaaauagcuaugaguauau

SEQ ID NO: 815463 - RNA, 20 nt, Artificial Sequence
  Synthetic
uuguggagauucuaguauau

SEQ ID NO: 815464 - RNA, 20 nt, Artificial Sequence
  Synthetic
uagaugauaaguagguauau

SEQ ID NO: 815465 - RNA, 20 nt, Artificial Sequence
  Synthetic
ugacaauguuuuggguauau

SEQ ID NO: 815466 - RNA, 20 nt, Artificial Sequence
  Synthetic
agaugacagauaauguauau

SEQ ID NO: 815467 - RNA, 20 nt, Artificial Sequence
  Synthetic
augagguauuuaauguauau

SEQ ID NO: 815468 - RNA, 20 nt, Artificial Sequence
  Synthetic
auuuauaguaccauguauau

SEQ ID NO: 815469 - RNA, 20 nt, Artificial Sequence
  Synthetic
aaaggcaaggccauguauau

SEQ ID NO: 815470 - RNA, 20 nt, Artificial Sequence
  Synthetic
uauaacaguuguauguauau

SEQ ID NO: 815471 - RNA, 20 nt, Artificial Sequence
  Synthetic
uacguagaacauguguauau

SEQ ID NO: 815472 - RNA, 20 nt, Artificial Sequence
  Synthetic
cauguguuacuuuuguauau

SEQ ID NO: 815473 - RNA, 20 nt, Artificial Sequence
  Synthetic
aguacuuuucaaaauuauau

SEQ ID NO: 815474 - RNA, 20 nt, Artificial Sequence
  Synthetic
aaaacugcauaaaauuauau

SEQ ID NO: 815475 - RNA, 20 nt, Artificial Sequence
  Synthetic
aaaguuuagcagaauuauau

SEQ ID NO: 815476 - RNA, 20 nt, Artificial Sequence
  Synthetic
uaaaaaaacaaucauuauau

SEQ ID NO: 815477 - RNA, 20 nt, Artificial Sequence
  Synthetic
uucugauuggaucauuauau

SEQ ID NO: 815478 - RNA, 20 nt, Artificial Sequence
  Synthetic
uaacuggcaucugauuauau

SEQ ID NO: 815479 - RNA, 20 nt, Artificial Sequence
  Synthetic
uguuuacuccucuauuauau

SEQ ID NO: 815480 - RNA, 20 nt, Artificial Sequence
  Synthetic
uuuuuaaaacauuauuauau

SEQ ID NO: 815481 - RNA, 20 nt, Artificial Sequence
  Synthetic
uugaauuuaacuacuuauau

SEQ ID NO: 815482 - RNA, 20 nt, Artificial Sequence
  Synthetic
auacuauucuuuccuuauau

SEQ ID NO: 815483 - RNA, 20 nt, Artificial Sequence
  Synthetic
auguguaacguggcuuauau

SEQ ID NO: 815484 - RNA, 20 nt, Artificial Sequence
  Synthetic
uaauaguaucauucuuauau

SEQ ID NO: 815485 - RNA, 20 nt, Artificial Sequence
  Synthetic
aucaucacacaaaguuauau

SEQ ID NO: 815486 - RNA, 20 nt, Artificial Sequence
  Synthetic
uuacuucugcuaaguuauau

SEQ ID NO: 815487 - RNA, 20 nt, Artificial Sequence
  Synthetic
acugauuauaauuguuauau

SEQ ID NO: 815488 - RNA, 20 nt, Artificial Sequence
  Synthetic
cgugugcagguuuguuauau

SEQ ID NO: 815489 - RNA, 20 nt, Artificial Sequence
  Synthetic
aauuuauuuccaauuuauau

SEQ ID NO: 815490 - RNA, 20 nt, Artificial Sequence
  Synthetic
uguaagaauuagauuuauau

SEQ ID NO: 815491 - RNA, 20 nt, Artificial Sequence
  Synthetic
aucuaucacuugauuuauau

SEQ ID NO: 815492 - RNA, 20 nt, Artificial Sequence
  Synthetic
cugugaauauauauuuauau

SEQ ID NO: 815493 - RNA, 20 nt, Artificial Sequence
  Synthetic
acuggccuauuuauuuauau

SEQ ID NO: 815494 - RNA, 20 nt, Artificial Sequence
  Synthetic
cuccuccauuaaguuuauau

SEQ ID NO: 815495 - RNA, 20 nt, Artificial Sequence
  Synthetic
caaguacauauaguuuauau

SEQ ID NO: 815496 - RNA, 20 nt, Artificial Sequence
  Synthetic
agaauagaacaauuuuauau

SEQ ID NO: 815497 - RNA, 20 nt, Artificial Sequence
  Synthetic
ugagagaugggauuuuauau

SEQ ID NO: 815498 - RNA, 20 nt, Artificial Sequence
  Synthetic
aaugguuuuggcuuuuauau

SEQ ID NO: 815499 - RNA, 20 nt, Artificial Sequence
  Synthetic
aaaguuucaguguuuuauau

SEQ ID NO: 815500 - RNA, 20 nt, Artificial Sequence
  Synthetic
ucucuauauaguuuuuauau

SEQ ID NO: 815501 - RNA, 20 nt, Artificial Sequence
  Synthetic
cuacaaggaaagaaaacuau

SEQ ID NO: 815502 - RNA, 20 nt, Artificial Sequence
  Synthetic
aaaagaguggugaaaacuau

SEQ ID NO: 815503 - RNA, 20 nt, Artificial Sequence
  Synthetic
uaccuacucaaccaaacuau

SEQ ID NO: 815504 - RNA, 20 nt, Artificial Sequence
  Synthetic
uacuaauuacuguaaacuau

SEQ ID NO: 815505 - RNA, 20 nt, Artificial Sequence
  Synthetic
acagaaauguguccaacuau

SEQ ID NO: 815506 - RNA, 20 nt, Artificial Sequence
  Synthetic
aguuaucaacuaucaacuau

SEQ ID NO: 815507 - RNA, 20 nt, Artificial Sequence
  Synthetic
agguuuggacaaugaacuau

SEQ ID NO: 815508 - RNA, 20 nt, Artificial Sequence
  Synthetic
aacuuucuuaaaauaacuau

SEQ ID NO: 815509 - RNA, 20 nt, Artificial Sequence
  Synthetic
aggguugaaaaacuaacuau

SEQ ID NO: 815510 - RNA, 20 nt, Artificial Sequence
  Synthetic
uaacuuuguaaauuaacuau

SEQ ID NO: 815511 - RNA, 20 nt, Artificial Sequence
  Synthetic
aguacaguaucguuaacuau

SEQ ID NO: 815512 - RNA, 20 nt, Artificial Sequence
  Synthetic
aaaucgguauuguuaacuau

SEQ ID NO: 815513 - RNA, 20 nt, Artificial Sequence
  Synthetic
uucaauuuuuaaaacacuau

SEQ ID NO: 815514 - RNA, 20 nt, Artificial Sequence
  Synthetic
cauaaauaaaucaacacuau

SEQ ID NO: 815515 - RNA, 20 nt, Artificial Sequence
  Synthetic
auuuucauuacuaacacuau

SEQ ID NO: 815516 - RNA, 20 nt, Artificial Sequence
  Synthetic
uccuucuuuuaauacacuau

SEQ ID NO: 815517 - RNA, 20 nt, Artificial Sequence
  Synthetic
cucucuucugucuacacuau

SEQ ID NO: 815518 - RNA, 20 nt, Artificial Sequence
  Synthetic
uauugcaaauuuuacacuau

SEQ ID NO: 815519 - RNA, 20 nt, Artificial Sequence
  Synthetic
aaggaaaccuuauccacuau

SEQ ID NO: 815520 - RNA, 20 nt, Artificial Sequence
  Synthetic
uggacugcccuguccacuau

SEQ ID NO: 815521 - RNA, 20 nt, Artificial Sequence
  Synthetic
cauauccccauuuccacuau

SEQ ID NO: 815522 - RNA, 20 nt, Artificial Sequence
  Synthetic
uggagaacaaaagucacuau

SEQ ID NO: 815523 - RNA, 20 nt, Artificial Sequence
  Synthetic
accuaugggagaaagacuau

SEQ ID NO: 815524 - RNA, 20 nt, Artificial Sequence
  Synthetic
auaccagagaggcagacuau

SEQ ID NO: 815525 - RNA, 20 nt, Artificial Sequence
  Synthetic
uuugugacccucuagacuau

SEQ ID NO: 815526 - RNA, 20 nt, Artificial Sequence
  Synthetic
ucccaaguagcugggacuau

SEQ ID NO: 815527 - RNA, 20 nt, Artificial Sequence
  Synthetic
ucccgaguagcugggacuau

SEQ ID NO: 815528 - RNA, 20 nt, Artificial Sequence
  Synthetic
aagcaacuauuuuggacuau

SEQ ID NO: 815529 - RNA, 20 nt, Artificial Sequence
  Synthetic
augaaaagauaagugacuau

SEQ ID NO: 815530 - RNA, 20 nt, Artificial Sequence
  Synthetic
cuacaaccagcugugacuau

SEQ ID NO: 815531 - RNA, 20 nt, Artificial Sequence
  Synthetic
aauuuuccucuuccuacuau

SEQ ID NO: 815532 - RNA, 20 nt, Artificial Sequence
  Synthetic
accuuuuguauaucuacuau

SEQ ID NO: 815533 - RNA, 20 nt, Artificial Sequence
  Synthetic
uuuagaaggaaaaguacuau

SEQ ID NO: 815534 - RNA, 20 nt, Artificial Sequence
  Synthetic
auuaaagaagagaguacuau

SEQ ID NO: 815535 - RNA, 20 nt, Artificial Sequence
  Synthetic
cuuugaugauaauguacuau

SEQ ID NO: 815536 - RNA, 20 nt, Artificial Sequence
  Synthetic
caauaauaguauauuacuau

SEQ ID NO: 815537 - RNA, 20 nt, Artificial Sequence
  Synthetic
uaugaauaguuuauuacuau

SEQ ID NO: 815538 - RNA, 20 nt, Artificial Sequence
  Synthetic
accauuugcacacuuacuau

SEQ ID NO: 815539 - RNA, 20 nt, Artificial Sequence
  Synthetic
caccauugagcacuuacuau

SEQ ID NO: 815540 - RNA, 20 nt, Artificial Sequence
  Synthetic
auuuuuuuuccuuuuacuau

SEQ ID NO: 815541 - RNA, 20 nt, Artificial Sequence
  Synthetic
aaccacauaccaaaaccuau

SEQ ID NO: 815542 - RNA, 20 nt, Artificial Sequence
  Synthetic
caucccccaaacaaaccuau

SEQ ID NO: 815543 - RNA, 20 nt, Artificial Sequence
  Synthetic
auccacuaguuugaaccuau

SEQ ID NO: 815544 - RNA, 20 nt, Artificial Sequence
  Synthetic
ucacuauuaguauaaccuau

SEQ ID NO: 815545 - RNA, 20 nt, Artificial Sequence
  Synthetic
uuuuuaugcuuuucaccuau

SEQ ID NO: 815546 - RNA, 20 nt, Artificial Sequence
  Synthetic
ugcuuauaaaauauaccuau

SEQ ID NO: 815547 - RNA, 20 nt, Artificial Sequence
  Synthetic
aggguugaaaaacuaccuau

SEQ ID NO: 815548 - RNA, 20 nt, Artificial Sequence
  Synthetic
uucucauuacaauuaccuau

SEQ ID NO: 815549 - RNA, 20 nt, Artificial Sequence
  Synthetic
ugcuuuagaguaaacccuau

SEQ ID NO: 815550 - RNA, 20 nt, Artificial Sequence
  Synthetic
auaaaaauuguagacccuau

SEQ ID NO: 815551 - RNA, 20 nt, Artificial Sequence
  Synthetic
cccauuuggcagagcccuau

SEQ ID NO: 815552 - RNA, 20 nt, Artificial Sequence
  Synthetic
aaguguaaugacugcccuau

SEQ ID NO: 815553 - RNA, 20 nt, Artificial Sequence
  Synthetic
uguuacaaccuagucccuau

SEQ ID NO: 815554 - RNA, 20 nt, Artificial Sequence
  Synthetic
ucacaaauucaggucccuau

SEQ ID NO: 815555 - RNA, 20 nt, Artificial Sequence
  Synthetic
aauagaauauauuucccuau

SEQ ID NO: 815556 - RNA, 20 nt, Artificial Sequence
  Synthetic
auuuaggcuuuaaagccuau

SEQ ID NO: 815557 - RNA, 20 nt, Artificial Sequence
  Synthetic
uuaaaagcagagcagccuau

SEQ ID NO: 815558 - RNA, 20 nt, Artificial Sequence
  Synthetic
uguugcaacuuugagccuau

SEQ ID NO: 815559 - RNA, 20 nt, Artificial Sequence
  Synthetic
aggauucugucauagccuau

SEQ ID NO: 815560 - RNA, 20 nt, Artificial Sequence
  Synthetic
aagugcagagaaaugccuau

SEQ ID NO: 815561 - RNA, 20 nt, Artificial Sequence
  Synthetic
aaguuuuuuuuuuugccuau

SEQ ID NO: 815562 - RNA, 20 nt, Artificial Sequence
  Synthetic
uuuaauagcauugauccuau

SEQ ID NO: 815563 - RNA, 20 nt, Artificial Sequence
  Synthetic
aggaaauucugaccuccuau

SEQ ID NO: 815564 - RNA, 20 nt, Artificial Sequence
  Synthetic
aaaggccacugugcuccuau

SEQ ID NO: 815565 - RNA, 20 nt, Artificial Sequence
  Synthetic
aauaggguuugugcuccuau

SEQ ID NO: 815566 - RNA, 20 nt, Artificial Sequence
  Synthetic
aaagccuugccugguccuau

SEQ ID NO: 815567 - RNA, 20 nt, Artificial Sequence
  Synthetic
agauaauauugucuuccuau

SEQ ID NO: 815568 - RNA, 20 nt, Artificial Sequence
  Synthetic
uguuuuuacauguuuccuau

SEQ ID NO: 815569 - RNA, 20 nt, Artificial Sequence
  Synthetic
agguauagugugaaagcuau

SEQ ID NO: 815570 - RNA, 20 nt, Artificial Sequence
  Synthetic
uaauuuuuaaguguagcuau

SEQ ID NO: 815571 - RNA, 20 nt, Artificial Sequence
  Synthetic
uacauugguuucuuagcuau

SEQ ID NO: 815572 - RNA, 20 nt, Artificial Sequence
  Synthetic
uucuaauuaucuuuagcuau

SEQ ID NO: 815573 - RNA, 20 nt, Artificial Sequence
  Synthetic
cacugcuuuagcuacgcuau

SEQ ID NO: 815574 - RNA, 20 nt, Artificial Sequence
  Synthetic
aguucaaggguaaaggcuau

SEQ ID NO: 815575 - RNA, 20 nt, Artificial Sequence
  Synthetic
agacuuuuucagaaggcuau

SEQ ID NO: 815576 - RNA, 20 nt, Artificial Sequence
  Synthetic
cuaaagaaguuggaggcuau

SEQ ID NO: 815577 - RNA, 20 nt, Artificial Sequence
  Synthetic
cagaaaaaaacugaggcuau

SEQ ID NO: 815578 - RNA, 20 nt, Artificial Sequence
  Synthetic
aaaacuguaacaagggcuau

SEQ ID NO: 815579 - RNA, 20 nt, Artificial Sequence
  Synthetic
aagugaaauuggugggcuau

SEQ ID NO: 815580 - RNA, 20 nt, Artificial Sequence
  Synthetic
cccauuuuauugacugcuau

SEQ ID NO: 815581 - RNA, 20 nt, Artificial Sequence
  Synthetic
agguuggggauugcugcuau

SEQ ID NO: 815582 - RNA, 20 nt, Artificial Sequence
  Synthetic
ugguaucuuuucucugcuau

SEQ ID NO: 815583 - RNA, 20 nt, Artificial Sequence
  Synthetic
aaaggaaggaauucugcuau

SEQ ID NO: 815584 - RNA, 20 nt, Artificial Sequence
  Synthetic
aacucuuugcuuucugcuau

SEQ ID NO: 815585 - RNA, 20 nt, Artificial Sequence
  Synthetic
uacaguaugauaagugcuau

SEQ ID NO: 815586 - RNA, 20 nt, Artificial Sequence
  Synthetic
auaggcuaauuaggugcuau

SEQ ID NO: 815587 - RNA, 20 nt, Artificial Sequence
  Synthetic
augauaauguauauugcuau

SEQ ID NO: 815588 - RNA, 20 nt, Artificial Sequence
  Synthetic
uaaaaaaacccuauugcuau

SEQ ID NO: 815589 - RNA, 20 nt, Artificial Sequence
  Synthetic
aguagaucuggaaaaucuau

SEQ ID NO: 815590 - RNA, 20 nt, Artificial Sequence
  Synthetic
uguagaagccauaaaucuau

SEQ ID NO: 815591 - RNA, 20 nt, Artificial Sequence
  Synthetic
ucuguuuccuucgaaucuau

SEQ ID NO: 815592 - RNA, 20 nt, Artificial Sequence
  Synthetic
acugaaaugagggaaucuau

SEQ ID NO: 815593 - RNA, 20 nt, Artificial Sequence
  Synthetic
aacacuucagcugaaucuau

SEQ ID NO: 815594 - RNA, 20 nt, Artificial Sequence
  Synthetic
aucuaauauccauaaucuau

SEQ ID NO: 815595 - RNA, 20 nt, Artificial Sequence
  Synthetic
uuauuuuaauuauaaucuau

SEQ ID NO: 815596 - RNA, 20 nt, Artificial Sequence
  Synthetic
aaaaugcacacuccaucuau

SEQ ID NO: 815597 - RNA, 20 nt, Artificial Sequence
  Synthetic
aaauuugguuuagcaucuau

SEQ ID NO: 815598 - RNA, 20 nt, Artificial Sequence
  Synthetic
aaugcaaugaugucaucuau

SEQ ID NO: 815599 - RNA, 20 nt, Artificial Sequence
  Synthetic
uaaggacaggguggaucuau

SEQ ID NO: 815600 - RNA, 20 nt, Artificial Sequence
  Synthetic
acguauuuuuaaugaucuau

SEQ ID NO: 815601 - RNA, 20 nt, Artificial Sequence
  Synthetic
aacuaccaauuccuaucuau

SEQ ID NO: 815602 - RNA, 20 nt, Artificial Sequence
  Synthetic
ugcaaaccuguauuaucuau

SEQ ID NO: 815603 - RNA, 20 nt, Artificial Sequence
  Synthetic
ucugauugauguuuaucuau

SEQ ID NO: 815604 - RNA, 20 nt, Artificial Sequence
  Synthetic
uuucagguguuuuuaucuau

SEQ ID NO: 815605 - RNA, 20 nt, Artificial Sequence
  Synthetic
aggaguuaaaacaacucuau

SEQ ID NO: 815606 - RNA, 20 nt, Artificial Sequence
  Synthetic
acugccucaaagaacucuau

SEQ ID NO: 815607 - RNA, 20 nt, Artificial Sequence
  Synthetic
uaauagaaaagacacucuau

SEQ ID NO: 815608 - RNA, 20 nt, Artificial Sequence
  Synthetic
agagugaaaacuaccucuau

SEQ ID NO: 815609 - RNA, 20 nt, Artificial Sequence
  Synthetic
uaaaauaguggucccucuau

SEQ ID NO: 815610 - RNA, 20 nt, Artificial Sequence
  Synthetic
acucuuuacuccuccucuau

SEQ ID NO: 815611 - RNA, 20 nt, Artificial Sequence
  Synthetic
aagaugaaaauguccucuau

SEQ ID NO: 815612 - RNA, 20 nt, Artificial Sequence
  Synthetic
uuuaauuuuaucuucucuau

SEQ ID NO: 815613 - RNA, 20 nt, Artificial Sequence
  Synthetic
aaagaaacacuuaagucuau

SEQ ID NO: 815614 - RNA, 20 nt, Artificial Sequence
  Synthetic
ucugucuguccauggucuau

SEQ ID NO: 815615 - RNA, 20 nt, Artificial Sequence
  Synthetic
uaggaaauugacuugucuau

SEQ ID NO: 815616 - RNA, 20 nt, Artificial Sequence
  Synthetic
cauugggcuugcuugucuau

SEQ ID NO: 815617 - RNA, 20 nt, Artificial Sequence
  Synthetic
uacuuccauugacauucuau

SEQ ID NO: 815618 - RNA, 20 nt, Artificial Sequence
  Synthetic
aaccuuuucucucauucuau

SEQ ID NO: 815619 - RNA, 20 nt, Artificial Sequence
  Synthetic
aaggaagggacauauucuau

SEQ ID NO: 815620 - RNA, 20 nt, Artificial Sequence
  Synthetic
caucucagaauauauucuau

SEQ ID NO: 815621 - RNA, 20 nt, Artificial Sequence
  Synthetic
uugucacaggaaacuucuau

SEQ ID NO: 815622 - RNA, 20 nt, Artificial Sequence
  Synthetic
aaguuucuuucaacuucuau

SEQ ID NO: 815623 - RNA, 20 nt, Artificial Sequence
  Synthetic
uagacgaaacagccuucuau

SEQ ID NO: 815624 - RNA, 20 nt, Artificial Sequence
  Synthetic
ccaauaauucaaucuucuau

SEQ ID NO: 815625 - RNA, 20 nt, Artificial Sequence
  Synthetic
ugugauguuguaucuucuau

SEQ ID NO: 815626 - RNA, 20 nt, Artificial Sequence
  Synthetic
uagaugaagcagucuucuau

SEQ ID NO: 815627 - RNA, 20 nt, Artificial Sequence
  Synthetic
auaauaagcuuuucuucuau

SEQ ID NO: 815628 - RNA, 20 nt, Artificial Sequence
  Synthetic
aucaucucagaaaguucuau

SEQ ID NO: 815629 - RNA, 20 nt, Artificial Sequence
  Synthetic
aggaaaagggauaguucuau

SEQ ID NO: 815630 - RNA, 20 nt, Artificial Sequence
  Synthetic
uugguaaguuuugguucuau

SEQ ID NO: 815631 - RNA, 20 nt, Artificial Sequence
  Synthetic
uauuucaguaaauguucuau

SEQ ID NO: 815632 - RNA, 20 nt, Artificial Sequence
  Synthetic
aaugagaagacauguucuau

SEQ ID NO: 815633 - RNA, 20 nt, Artificial Sequence
  Synthetic
uguucucuauucuguucuau

SEQ ID NO: 815634 - RNA, 20 nt, Artificial Sequence
  Synthetic
uggaaccuuuuaauuucuau

SEQ ID NO: 815635 - RNA, 20 nt, Artificial Sequence
  Synthetic
uagguggcucucauuucuau

SEQ ID NO: 815636 - RNA, 20 nt, Artificial Sequence
  Synthetic
uuuucgauugucauuucuau

SEQ ID NO: 815637 - RNA, 20 nt, Artificial Sequence
  Synthetic
aaucuacaucagauuucuau

SEQ ID NO: 815638 - RNA, 20 nt, Artificial Sequence
  Synthetic
aacuucuuuccucuuucuau

SEQ ID NO: 815639 - RNA, 20 nt, Artificial Sequence
  Synthetic
cucuuaauugcauuuucuau

SEQ ID NO: 815640 - RNA, 20 nt, Artificial Sequence
  Synthetic
aacauuuucaucuuuucuau

SEQ ID NO: 815641 - RNA, 20 nt, Artificial Sequence
  Synthetic
aacuuuucccauuuuucuau

SEQ ID NO: 815642 - RNA, 20 nt, Artificial Sequence
  Synthetic
acccuaggaaauaaaaguau

SEQ ID NO: 815643 - RNA, 20 nt, Artificial Sequence
  Synthetic
aaauuucaauggcaaaguau

SEQ ID NO: 815644 - RNA, 20 nt, Artificial Sequence
  Synthetic
aaagaaaagaaagaaaguau

SEQ ID NO: 815645 - RNA, 20 nt, Artificial Sequence
  Synthetic
cagagaaaacaggaaaguau

SEQ ID NO: 815646 - RNA, 20 nt, Artificial Sequence
  Synthetic
agaagaagacaggaaaguau

SEQ ID NO: 815647 - RNA, 20 nt, Artificial Sequence
  Synthetic
ugauaugcccuggaaaguau

SEQ ID NO: 815648 - RNA, 20 nt, Artificial Sequence
  Synthetic
auguguauuuaugaaaguau

SEQ ID NO: 815649 - RNA, 20 nt, Artificial Sequence
  Synthetic
uauuuucuaacauaaaguau

SEQ ID NO: 815650 - RNA, 20 nt, Artificial Sequence
  Synthetic
aauaagagaagguaaaguau

SEQ ID NO: 815651 - RNA, 20 nt, Artificial Sequence
  Synthetic
ucuaaaaacuauuaaaguau

SEQ ID NO: 815652 - RNA, 20 nt, Artificial Sequence
  Synthetic
uggccagguuugccaaguau

SEQ ID NO: 815653 - RNA, 20 nt, Artificial Sequence
  Synthetic
uugggguggaguccaaguau

SEQ ID NO: 815654 - RNA, 20 nt, Artificial Sequence
  Synthetic
aaugaaagaguagcaaguau

SEQ ID NO: 815655 - RNA, 20 nt, Artificial Sequence
  Synthetic
aaggaaggaggugcaaguau

SEQ ID NO: 815656 - RNA, 20 nt, Artificial Sequence
  Synthetic
caaaugauaaaaagaaguau

SEQ ID NO: 815657 - RNA, 20 nt, Artificial Sequence
  Synthetic
uuugcggcagauggaaguau

SEQ ID NO: 815658 - RNA, 20 nt, Artificial Sequence
  Synthetic
ucaaaacaaccuugaaguau

SEQ ID NO: 815659 - RNA, 20 nt, Artificial Sequence
  Synthetic
uaaaauucauauauaaguau

SEQ ID NO: 815660 - RNA, 20 nt, Artificial Sequence
  Synthetic
uaagaaggauaaguaaguau

SEQ ID NO: 815661 - RNA, 20 nt, Artificial Sequence
  Synthetic
ccuaaaaggaagguaaguau

SEQ ID NO: 815662 - RNA, 20 nt, Artificial Sequence
  Synthetic
aaaaucucugaaaacaguau

SEQ ID NO: 815663 - RNA, 20 nt, Artificial Sequence
  Synthetic
caguaccaugagaacaguau

SEQ ID NO: 815664 - RNA, 20 nt, Artificial Sequence
  Synthetic
uaauuaggaaagcacaguau

SEQ ID NO: 815665 - RNA, 20 nt, Artificial Sequence
  Synthetic
aauugagagaaguacaguau

SEQ ID NO: 815666 - RNA, 20 nt, Artificial Sequence
  Synthetic
uuuuucucacugcccaguau

SEQ ID NO: 815667 - RNA, 20 nt, Artificial Sequence
  Synthetic
uauuccuggaccagcaguau

SEQ ID NO: 815668 - RNA, 20 nt, Artificial Sequence
  Synthetic
cuaaguauuuguugcaguau

SEQ ID NO: 815669 - RNA, 20 nt, Artificial Sequence
  Synthetic
uuacaaguaaaucucaguau

SEQ ID NO: 815670 - RNA, 20 nt, Artificial Sequence
  Synthetic
uuuagauaguaagagaguau

SEQ ID NO: 815671 - RNA, 20 nt, Artificial Sequence
  Synthetic
aauuaaaauauaucgaguau

SEQ ID NO: 815672 - RNA, 20 nt, Artificial Sequence
  Synthetic
acagguuucagcaggaguau

SEQ ID NO: 815673 - RNA, 20 nt, Artificial Sequence
  Synthetic
auauaucucagugggaguau

SEQ ID NO: 815674 - RNA, 20 nt, Artificial Sequence
  Synthetic
uagcuguaaagcuggaguau

SEQ ID NO: 815675 - RNA, 20 nt, Artificial Sequence
  Synthetic
agaauuucaaacaugaguau

SEQ ID NO: 815676 - RNA, 20 nt, Artificial Sequence
  Synthetic
acagucuucaucaugaguau

SEQ ID NO: 815677 - RNA, 20 nt, Artificial Sequence
  Synthetic
ccguuucuccaucugaguau

SEQ ID NO: 815678 - RNA, 20 nt, Artificial Sequence
  Synthetic
uuaacagcggaugugaguau

SEQ ID NO: 815679 - RNA, 20 nt, Artificial Sequence
  Synthetic
ccauuucuauaaaauaguau

SEQ ID NO: 815680 - RNA, 20 nt, Artificial Sequence
  Synthetic
cccuuggcugcaaauaguau

SEQ ID NO: 815681 - RNA, 20 nt, Artificial Sequence
  Synthetic
cugccuauaucaaauaguau

SEQ ID NO: 815682 - RNA, 20 nt, Artificial Sequence
  Synthetic
aguguaaauuagaauaguau

SEQ ID NO: 815683 - RNA, 20 nt, Artificial Sequence
  Synthetic
acuccuauucaacauaguau

SEQ ID NO: 815684 - RNA, 20 nt, Artificial Sequence
  Synthetic
uuacaaggaagggauaguau

SEQ ID NO: 815685 - RNA, 20 nt, Artificial Sequence
  Synthetic
aagcagaaaauaucuaguau

SEQ ID NO: 815686 - RNA, 20 nt, Artificial Sequence
  Synthetic
cucugauuuaauuguaguau

SEQ ID NO: 815687 - RNA, 20 nt, Artificial Sequence
  Synthetic
ugaacuuuuaaaauuaguau

SEQ ID NO: 815688 - RNA, 20 nt, Artificial Sequence
  Synthetic
auaugguagaagguuaguau

SEQ ID NO: 815689 - RNA, 20 nt, Artificial Sequence
  Synthetic
aagaaauuuuugguuaguau

SEQ ID NO: 815690 - RNA, 20 nt, Artificial Sequence
  Synthetic
auuaauuuaacacaacguau

SEQ ID NO: 815691 - RNA, 20 nt, Artificial Sequence
  Synthetic
ucauaagaucaagcacguau

SEQ ID NO: 815692 - RNA, 20 nt, Artificial Sequence
  Synthetic
acacuuucuuuggcacguau

SEQ ID NO: 815693 - RNA, 20 nt, Artificial Sequence
  Synthetic
ugauaauacuaaugacguau

SEQ ID NO: 815694 - RNA, 20 nt, Artificial Sequence
  Synthetic
agugaucaguaaguacguau

SEQ ID NO: 815695 - RNA, 20 nt, Artificial Sequence
  Synthetic
cccagcucaucuuuccguau

SEQ ID NO: 815696 - RNA, 20 nt, Artificial Sequence
  Synthetic
uuuauaucauaagagcguau

SEQ ID NO: 815697 - RNA, 20 nt, Artificial Sequence
  Synthetic
uuugucuauuauuggcguau

SEQ ID NO: 815698 - RNA, 20 nt, Artificial Sequence
  Synthetic
augcaaagaacaaaagguau

SEQ ID NO: 815699 - RNA, 20 nt, Artificial Sequence
  Synthetic
aaaggugaaaagaaagguau

SEQ ID NO: 815700 - RNA, 20 nt, Artificial Sequence
  Synthetic
uauaaucuguggaaagguau

SEQ ID NO: 815701 - RNA, 20 nt, Artificial Sequence
  Synthetic
uggaaaugucuccaagguau

SEQ ID NO: 815702 - RNA, 20 nt, Artificial Sequence
  Synthetic
aaaugaagaauagaagguau

SEQ ID NO: 815703 - RNA, 20 nt, Artificial Sequence
  Synthetic
ucaauagcuguagaagguau

SEQ ID NO: 815704 - RNA, 20 nt, Artificial Sequence
  Synthetic
aaugaggaagaggaagguau

SEQ ID NO: 815705 - RNA, 20 nt, Artificial Sequence
  Synthetic
cucugaauuggcccagguau

SEQ ID NO: 815706 - RNA, 20 nt, Artificial Sequence
  Synthetic
caaauuuauauuucagguau

SEQ ID NO: 815707 - RNA, 20 nt, Artificial Sequence
  Synthetic
ugcuuuuauuucagagguau

SEQ ID NO: 815708 - RNA, 20 nt, Artificial Sequence
  Synthetic
uuuuuaaacucuagagguau

SEQ ID NO: 815709 - RNA, 20 nt, Artificial Sequence
  Synthetic
aagaaggaaagaaaggguau

SEQ ID NO: 815710 - RNA, 20 nt, Artificial Sequence
  Synthetic
acaccugagagugaggguau

SEQ ID NO: 815711 - RNA, 20 nt, Artificial Sequence
  Synthetic
uacuucaauaauuaggguau

SEQ ID NO: 815712 - RNA, 20 nt, Artificial Sequence
  Synthetic
uucaguaguuuuggggguau

SEQ ID NO: 815713 - RNA, 20 nt, Artificial Sequence
  Synthetic
uuugcugaugaaugggguau

SEQ ID NO: 815714 - RNA, 20 nt, Artificial Sequence
  Synthetic
uauuaugaguggguggguau

SEQ ID NO: 815715 - RNA, 20 nt, Artificial Sequence
  Synthetic
cagaauggagugguggguau

SEQ ID NO: 815716 - RNA, 20 nt, Artificial Sequence
  Synthetic
cuucucaagagccaugguau

SEQ ID NO: 815717 - RNA, 20 nt, Artificial Sequence
  Synthetic
auauaaaucauccaugguau

SEQ ID NO: 815718 - RNA, 20 nt, Artificial Sequence
  Synthetic
uaaccaaaacaguaugguau

SEQ ID NO: 815719 - RNA, 20 nt, Artificial Sequence
  Synthetic
agacugccuuucccugguau

SEQ ID NO: 815720 - RNA, 20 nt, Artificial Sequence
  Synthetic
cggauuaaaaaaugugguau

SEQ ID NO: 815721 - RNA, 20 nt, Artificial Sequence
  Synthetic
uauggcauagauugugguau

SEQ ID NO: 815722 - RNA, 20 nt, Artificial Sequence
  Synthetic
aaaguucaugguugugguau

SEQ ID NO: 815723 - RNA, 20 nt, Artificial Sequence
  Synthetic
aagggacuguuaauugguau

SEQ ID NO: 815724 - RNA, 20 nt, Artificial Sequence
  Synthetic
agaacaaaagguauugguau

SEQ ID NO: 815725 - RNA, 20 nt, Artificial Sequence
  Synthetic
auguuugcagugcuugguau

SEQ ID NO: 815726 - RNA, 20 nt, Artificial Sequence
  Synthetic
uaaaauaacuaauuugguau

SEQ ID NO: 815727 - RNA, 20 nt, Artificial Sequence
  Synthetic
auuuacuucucauuugguau

SEQ ID NO: 815728 - RNA, 20 nt, Artificial Sequence
  Synthetic
ugauuccaugucuuugguau

SEQ ID NO: 815729 - RNA, 20 nt, Artificial Sequence
  Synthetic
uguaaugaacaaaaauguau

SEQ ID NO: 815730 - RNA, 20 nt, Artificial Sequence
  Synthetic
ccaagauaguagaaauguau

SEQ ID NO: 815731 - RNA, 20 nt, Artificial Sequence
  Synthetic
aaacgaauucugaaauguau

SEQ ID NO: 815732 - RNA, 20 nt, Artificial Sequence
  Synthetic
uacauaaaugauaaauguau

SEQ ID NO: 815733 - RNA, 20 nt, Artificial Sequence
  Synthetic
uuagccauuccacaauguau

SEQ ID NO: 815734 - RNA, 20 nt, Artificial Sequence
  Synthetic
acugggggaaaauaauguau

SEQ ID NO: 815735 - RNA, 20 nt, Artificial Sequence
  Synthetic
aagcacucacaauaauguau

SEQ ID NO: 815736 - RNA, 20 nt, Artificial Sequence
  Synthetic
aggucuguggaauaauguau

SEQ ID NO: 815737 - RNA, 20 nt, Artificial Sequence
  Synthetic
acucaaaugagcuaauguau

SEQ ID NO: 815738 - RNA, 20 nt, Artificial Sequence
  Synthetic
uucuaauucugggcauguau

SEQ ID NO: 815739 - RNA, 20 nt, Artificial Sequence
  Synthetic
aggaaaaauuaaugauguau

SEQ ID NO: 815740 - RNA, 20 nt, Artificial Sequence
  Synthetic
uaauauaaccaaauauguau

SEQ ID NO: 815741 - RNA, 20 nt, Artificial Sequence
  Synthetic
aacuagauagaaauauguau

SEQ ID NO: 815742 - RNA, 20 nt, Artificial Sequence
  Synthetic
acuauaacugaccuauguau

SEQ ID NO: 815743 - RNA, 20 nt, Artificial Sequence
  Synthetic
uagugcaguaugguauguau

SEQ ID NO: 815744 - RNA, 20 nt, Artificial Sequence
  Synthetic
cgcuuaaaauauuuauguau

SEQ ID NO: 815745 - RNA, 20 nt, Artificial Sequence
  Synthetic
ucaugcuaaagaaacuguau

SEQ ID NO: 815746 - RNA, 20 nt, Artificial Sequence
  Synthetic
ucggggcaagaccacuguau

SEQ ID NO: 815747 - RNA, 20 nt, Artificial Sequence
  Synthetic
uuggauugcaucuacuguau

SEQ ID NO: 815748 - RNA, 20 nt, Artificial Sequence
  Synthetic
aguuuagcaaaguacuguau

SEQ ID NO: 815749 - RNA, 20 nt, Artificial Sequence
  Synthetic
cucucaggagaagccuguau

SEQ ID NO: 815750 - RNA, 20 nt, Artificial Sequence
  Synthetic
aaauaccaaaugagcuguau

SEQ ID NO: 815751 - RNA, 20 nt, Artificial Sequence
  Synthetic
aucaccucagucugcuguau

SEQ ID NO: 815752 - RNA, 20 nt, Artificial Sequence
  Synthetic
ugcaaugguauuugcuguau

SEQ ID NO: 815753 - RNA, 20 nt, Artificial Sequence
  Synthetic
auauuuuggguaaucuguau

SEQ ID NO: 815754 - RNA, 20 nt, Artificial Sequence
  Synthetic
caaauacaaaugaucuguau

SEQ ID NO: 815755 - RNA, 20 nt, Artificial Sequence
  Synthetic
uuggccaucuuuaucuguau

SEQ ID NO: 815756 - RNA, 20 nt, Artificial Sequence
  Synthetic
auuccccaguggcucuguau

SEQ ID NO: 815757 - RNA, 20 nt, Artificial Sequence
  Synthetic
acucuacaugagaaguguau

SEQ ID NO: 815758 - RNA, 20 nt, Artificial Sequence
  Synthetic
aaugcauuuagguaguguau

SEQ ID NO: 815759 - RNA, 20 nt, Artificial Sequence
  Synthetic
uuugucuauucuugguguau

SEQ ID NO: 815760 - RNA, 20 nt, Artificial Sequence
  Synthetic
ucaaauuaacaaauguguau

SEQ ID NO: 815761 - RNA, 20 nt, Artificial Sequence
  Synthetic
cagaguaauaugauguguau

SEQ ID NO: 815762 - RNA, 20 nt, Artificial Sequence
  Synthetic
agaacaaaguguguguguau

SEQ ID NO: 815763 - RNA, 20 nt, Artificial Sequence
  Synthetic
uggcuaagguuauuguguau

SEQ ID NO: 815764 - RNA, 20 nt, Artificial Sequence
  Synthetic
aaaagaaagcccuuguguau

SEQ ID NO: 815765 - RNA, 20 nt, Artificial Sequence
  Synthetic
cuuaguuuauuuuuguguau

SEQ ID NO: 815766 - RNA, 20 nt, Artificial Sequence
  Synthetic
caacuucauaaaaauuguau

SEQ ID NO: 815767 - RNA, 20 nt, Artificial Sequence
  Synthetic
acauagcauuuacauuguau

SEQ ID NO: 815768 - RNA, 20 nt, Artificial Sequence
  Synthetic
auuaggcaaaaauauuguau

SEQ ID NO: 815769 - RNA, 20 nt, Artificial Sequence
  Synthetic
uauuuucuugcauauuguau

SEQ ID NO: 815770 - RNA, 20 nt, Artificial Sequence
  Synthetic
aucucccacuauuauuguau

SEQ ID NO: 815771 - RNA, 20 nt, Artificial Sequence
  Synthetic
uacaucucccuggcuuguau

SEQ ID NO: 815772 - RNA, 20 nt, Artificial Sequence
  Synthetic
uguguuuucucuuguuguau

SEQ ID NO: 815773 - RNA, 20 nt, Artificial Sequence
  Synthetic
agaaguuuuuagauuuguau

SEQ ID NO: 815774 - RNA, 20 nt, Artificial Sequence
  Synthetic
uaagugccccuccuuuguau

SEQ ID NO: 815775 - RNA, 20 nt, Artificial Sequence
  Synthetic
uaacuuaaaggcguuuguau

SEQ ID NO: 815776 - RNA, 20 nt, Artificial Sequence
  Synthetic
caacaguaaguauuuuguau

SEQ ID NO: 815777 - RNA, 20 nt, Artificial Sequence
  Synthetic
ugcuguuuuacuuuuuguau

SEQ ID NO: 815778 - RNA, 20 nt, Artificial Sequence
  Synthetic
aagauugguggcaaaauuau

SEQ ID NO: 815779 - RNA, 20 nt, Artificial Sequence
  Synthetic
agaacauccuucaaaauuau

SEQ ID NO: 815780 - RNA, 20 nt, Artificial Sequence
  Synthetic
ucaagggauaggaaaauuau

SEQ ID NO: 815781 - RNA, 20 nt, Artificial Sequence
  Synthetic
accauacuuaauaaaauuau

SEQ ID NO: 815782 - RNA, 20 nt, Artificial Sequence
  Synthetic
cacagaggugauaaaauuau

SEQ ID NO: 815783 - RNA, 20 nt, Artificial Sequence
  Synthetic
uuaaacauauauaaaauuau

SEQ ID NO: 815784 - RNA, 20 nt, Artificial Sequence
  Synthetic
uuguuaaaaaugcaaauuau

SEQ ID NO: 815785 - RNA, 20 nt, Artificial Sequence
  Synthetic
auaacaaugacagaaauuau

SEQ ID NO: 815786 - RNA, 20 nt, Artificial Sequence
  Synthetic
ccauauaguaaugaaauuau

SEQ ID NO: 815787 - RNA, 20 nt, Artificial Sequence
  Synthetic
ucaugucagugugaaauuau

SEQ ID NO: 815788 - RNA, 20 nt, Artificial Sequence
  Synthetic
aaugauauuuuugaaauuau

SEQ ID NO: 815789 - RNA, 20 nt, Artificial Sequence
  Synthetic
auaauugcugaauaaauuau

SEQ ID NO: 815790 - RNA, 20 nt, Artificial Sequence
  Synthetic
aaugcacauuuauaaauuau

SEQ ID NO: 815791 - RNA, 20 nt, Artificial Sequence
  Synthetic
uuuauuuuucuguaaauuau

SEQ ID NO: 815792 - RNA, 20 nt, Artificial Sequence
  Synthetic
auaugcuccuaaacaauuau

SEQ ID NO: 815793 - RNA, 20 nt, Artificial Sequence
  Synthetic
auuaauaagauaacaauuau

SEQ ID NO: 815794 - RNA, 20 nt, Artificial Sequence
  Synthetic
aauuuuacauuuacaauuau

SEQ ID NO: 815795 - RNA, 20 nt, Artificial Sequence
  Synthetic
ccuagacagcucucaauuau

SEQ ID NO: 815796 - RNA, 20 nt, Artificial Sequence
  Synthetic
auauuuauaaagucaauuau

SEQ ID NO: 815797 - RNA, 20 nt, Artificial Sequence
  Synthetic
aagaaugauuugagaauuau

SEQ ID NO: 815798 - RNA, 20 nt, Artificial Sequence
  Synthetic
ccacaacaaguaggaauuau

SEQ ID NO: 815799 - RNA, 20 nt, Artificial Sequence
  Synthetic
uccuauguaaauggaauuau

SEQ ID NO: 815800 - RNA, 20 nt, Artificial Sequence
  Synthetic
auacccagaaguggaauuau

SEQ ID NO: 815801 - RNA, 20 nt, Artificial Sequence
  Synthetic
ccaauagaagauugaauuau

SEQ ID NO: 815802 - RNA, 20 nt, Artificial Sequence
  Synthetic
acucaaagaucuugaauuau

SEQ ID NO: 815803 - RNA, 20 nt, Artificial Sequence
  Synthetic
agaucaggaaaaauaauuau

SEQ ID NO: 815804 - RNA, 20 nt, Artificial Sequence
  Synthetic
aagaaccaagaaauaauuau

SEQ ID NO: 815805 - RNA, 20 nt, Artificial Sequence
  Synthetic
aucauucgucuaauaauuau

SEQ ID NO: 815806 - RNA, 20 nt, Artificial Sequence
  Synthetic
auuacuugcuuuauaauuau

SEQ ID NO: 815807 - RNA, 20 nt, Artificial Sequence
  Synthetic
cugauguagccaguaauuau

SEQ ID NO: 815808 - RNA, 20 nt, Artificial Sequence
  Synthetic
cugguggaagagguaauuau

SEQ ID NO: 815809 - RNA, 20 nt, Artificial Sequence
  Synthetic
ugaaccuuaagauuaauuau

SEQ ID NO: 815810 - RNA, 20 nt, Artificial Sequence
  Synthetic
uccauaacuggcuuaauuau

SEQ ID NO: 815811 - RNA, 20 nt, Artificial Sequence
  Synthetic
auuuaucgagcuuuaauuau

SEQ ID NO: 815812 - RNA, 20 nt, Artificial Sequence
  Synthetic
aacuuacuggagaacauuau

SEQ ID NO: 815813 - RNA, 20 nt, Artificial Sequence
  Synthetic
uucacacuauuucacauuau

SEQ ID NO: 815814 - RNA, 20 nt, Artificial Sequence
  Synthetic
aacugcauccucaccauuau

SEQ ID NO: 815815 - RNA, 20 nt, Artificial Sequence
  Synthetic
ugacccagcaaucccauuau

SEQ ID NO: 815816 - RNA, 20 nt, Artificial Sequence
  Synthetic
auuaauuauucucccauuau

SEQ ID NO: 815817 - RNA, 20 nt, Artificial Sequence
  Synthetic
agugaccucuuucccauuau

SEQ ID NO: 815818 - RNA, 20 nt, Artificial Sequence
  Synthetic
uuauccuaguguuccauuau

SEQ ID NO: 815819 - RNA, 20 nt, Artificial Sequence
  Synthetic
aauauaacugagagcauuau

SEQ ID NO: 815820 - RNA, 20 nt, Artificial Sequence
  Synthetic
uuggauggagugugcauuau

SEQ ID NO: 815821 - RNA, 20 nt, Artificial Sequence
  Synthetic
auggaagcaccuugcauuau

SEQ ID NO: 815822 - RNA, 20 nt, Artificial Sequence
  Synthetic
auguacaauuaaaucauuau

SEQ ID NO: 815823 - RNA, 20 nt, Artificial Sequence
  Synthetic
ucagauuuuaaaaagauuau

SEQ ID NO: 815824 - RNA, 20 nt, Artificial Sequence
  Synthetic
ucccucgccuuucagauuau

SEQ ID NO: 815825 - RNA, 20 nt, Artificial Sequence
  Synthetic
acuuuaauauuagagauuau

SEQ ID NO: 815826 - RNA, 20 nt, Artificial Sequence
  Synthetic
ccugugaaacaaaggauuau

SEQ ID NO: 815827 - RNA, 20 nt, Artificial Sequence
  Synthetic
uccugaguagcuaggauuau

SEQ ID NO: 815828 - RNA, 20 nt, Artificial Sequence
  Synthetic
ucccaaagugcuaggauuau

SEQ ID NO: 815829 - RNA, 20 nt, Artificial Sequence
  Synthetic
auuauaugaauuaggauuau

SEQ ID NO: 815830 - RNA, 20 nt, Artificial Sequence
  Synthetic
uugaaaaaaauagggauuau

SEQ ID NO: 815831 - RNA, 20 nt, Artificial Sequence
  Synthetic
ccaugacacauggggauuau

SEQ ID NO: 815832 - RNA, 20 nt, Artificial Sequence
  Synthetic
cuuugacaccuggggauuau

SEQ ID NO: 815833 - RNA, 20 nt, Artificial Sequence
  Synthetic
ccaugacaucuggggauuau

SEQ ID NO: 815834 - RNA, 20 nt, Artificial Sequence
  Synthetic
ccacaacacguggggauuau

SEQ ID NO: 815835 - RNA, 20 nt, Artificial Sequence
  Synthetic
ucccuaguagcugggauuau

SEQ ID NO: 815836 - RNA, 20 nt, Artificial Sequence
  Synthetic
ucccaaagugcugggauuau

SEQ ID NO: 815837 - RNA, 20 nt, Artificial Sequence
  Synthetic
ucgcaaagugcugggauuau

SEQ ID NO: 815838 - RNA, 20 nt, Artificial Sequence
  Synthetic
uccugaguaguugggauuau

SEQ ID NO: 815839 - RNA, 20 nt, Artificial Sequence
  Synthetic
ucccaaaguguugggauuau

SEQ ID NO: 815840 - RNA, 20 nt, Artificial Sequence
  Synthetic
aacaguuggcacuggauuau

SEQ ID NO: 815841 - RNA, 20 nt, Artificial Sequence
  Synthetic
uuuuaggaugcaaugauuau

SEQ ID NO: 815842 - RNA, 20 nt, Artificial Sequence
  Synthetic
uagcaucugguaaugauuau

SEQ ID NO: 815843 - RNA, 20 nt, Artificial Sequence
  Synthetic
cuuauuuacaacaugauuau

SEQ ID NO: 815844 - RNA, 20 nt, Artificial Sequence
  Synthetic
uuacagagcacuaugauuau

SEQ ID NO: 815845 - RNA, 20 nt, Artificial Sequence
  Synthetic
uucaagauagguaugauuau

SEQ ID NO: 815846 - RNA, 20 nt, Artificial Sequence
  Synthetic
auuauuaccuuuaugauuau

SEQ ID NO: 815847 - RNA, 20 nt, Artificial Sequence
  Synthetic
ugcaaacaguaugugauuau

SEQ ID NO: 815848 - RNA, 20 nt, Artificial Sequence
  Synthetic
uacuugguuaccuugauuau

SEQ ID NO: 815849 - RNA, 20 nt, Artificial Sequence
  Synthetic
caggauaaggaguugauuau

SEQ ID NO: 815850 - RNA, 20 nt, Artificial Sequence
  Synthetic
aacaagauaguaaauauuau

SEQ ID NO: 815851 - RNA, 20 nt, Artificial Sequence
  Synthetic
cuguuuagcacgcauauuau

SEQ ID NO: 815852 - RNA, 20 nt, Artificial Sequence
  Synthetic
aaacaggauuggcauauuau

SEQ ID NO: 815853 - RNA, 20 nt, Artificial Sequence
  Synthetic
aguaauaauuucgauauuau

SEQ ID NO: 815854 - RNA, 20 nt, Artificial Sequence
  Synthetic
ccauuuggugaauauauuau

SEQ ID NO: 815855 - RNA, 20 nt, Artificial Sequence
  Synthetic
uuagucgacaacuauauuau

SEQ ID NO: 815856 - RNA, 20 nt, Artificial Sequence
  Synthetic
ccaagaggauaguauauuau

SEQ ID NO: 815857 - RNA, 20 nt, Artificial Sequence
  Synthetic
uuuauuccaaaaacuauuau

SEQ ID NO: 815858 - RNA, 20 nt, Artificial Sequence
  Synthetic
aaugaguauucugcuauuau

SEQ ID NO: 815859 - RNA, 20 nt, Artificial Sequence
  Synthetic
cauugggcugugucuauuau

SEQ ID NO: 815860 - RNA, 20 nt, Artificial Sequence
  Synthetic
acucuuguugauucuauuau

SEQ ID NO: 815861 - RNA, 20 nt, Artificial Sequence
  Synthetic
uacauauugucuucuauuau

SEQ ID NO: 815862 - RNA, 20 nt, Artificial Sequence
  Synthetic
ccuuaaaagguagguauuau

SEQ ID NO: 815863 - RNA, 20 nt, Artificial Sequence
  Synthetic
aucaguuuucuggguauuau

SEQ ID NO: 815864 - RNA, 20 nt, Artificial Sequence
  Synthetic
aaacauaagaaugguauuau

SEQ ID NO: 815865 - RNA, 20 nt, Artificial Sequence
  Synthetic
agaagaggaaagauuauuau

SEQ ID NO: 815866 - RNA, 20 nt, Artificial Sequence
  Synthetic
uauuuucccuagauuauuau

SEQ ID NO: 815867 - RNA, 20 nt, Artificial Sequence
  Synthetic
ugaugacauaauauuauuau

SEQ ID NO: 815868 - RNA, 20 nt, Artificial Sequence
  Synthetic
uuacauuuucaacuuauuau

SEQ ID NO: 815869 - RNA, 20 nt, Artificial Sequence
  Synthetic
auagaagaaaagcuuauuau

SEQ ID NO: 815870 - RNA, 20 nt, Artificial Sequence
  Synthetic
auuaggaauuuaguuauuau

SEQ ID NO: 815871 - RNA, 20 nt, Artificial Sequence
  Synthetic
uuccuuuugauuguuauuau

SEQ ID NO: 815872 - RNA, 20 nt, Artificial Sequence
  Synthetic
ugcuaacucucauuuauuau

SEQ ID NO: 815873 - RNA, 20 nt, Artificial Sequence
  Synthetic
caugaugaauaaaaacuuau

SEQ ID NO: 815874 - RNA, 20 nt, Artificial Sequence
  Synthetic
uacaauauaccaaaacuuau

SEQ ID NO: 815875 - RNA, 20 nt, Artificial Sequence
  Synthetic
aggaggcccaucaaacuuau

SEQ ID NO: 815876 - RNA, 20 nt, Artificial Sequence
  Synthetic
aagaccaggaucaaacuuau

SEQ ID NO: 815877 - RNA, 20 nt, Artificial Sequence
  Synthetic
uauggcuugccuaaacuuau

SEQ ID NO: 815878 - RNA, 20 nt, Artificial Sequence
  Synthetic
uggucuauaguuaaacuuau

SEQ ID NO: 815879 - RNA, 20 nt, Artificial Sequence
  Synthetic
auguaaccaagcacacuuau

SEQ ID NO: 815880 - RNA, 20 nt, Artificial Sequence
  Synthetic
aucguucaacucccacuuau

SEQ ID NO: 815881 - RNA, 20 nt, Artificial Sequence
  Synthetic
uauguuaaauaaucacuuau

SEQ ID NO: 815882 - RNA, 20 nt, Artificial Sequence
  Synthetic
ucuuuccauagaucacuuau

SEQ ID NO: 815883 - RNA, 20 nt, Artificial Sequence
  Synthetic
agauaccuaaucagacuuau

SEQ ID NO: 815884 - RNA, 20 nt, Artificial Sequence
  Synthetic
uaugaggacauuagacuuau

SEQ ID NO: 815885 - RNA, 20 nt, Artificial Sequence
  Synthetic
cagaugaacuaaugacuuau

SEQ ID NO: 815886 - RNA, 20 nt, Artificial Sequence
  Synthetic
cugcuaucucccugacuuau

SEQ ID NO: 815887 - RNA, 20 nt, Artificial Sequence
  Synthetic
uucaccaagaacauacuuau

SEQ ID NO: 815888 - RNA, 20 nt, Artificial Sequence
  Synthetic
ucauguaaauuauuacuuau

SEQ ID NO: 815889 - RNA, 20 nt, Artificial Sequence
  Synthetic
cuuucacuauaguuacuuau

SEQ ID NO: 815890 - RNA, 20 nt, Artificial Sequence
  Synthetic
uuacauuuauuuuuacuuau

SEQ ID NO: 815891 - RNA, 20 nt, Artificial Sequence
  Synthetic
augugaaaauggaaccuuau

SEQ ID NO: 815892 - RNA, 20 nt, Artificial Sequence
  Synthetic
ucaaaacaaauugaccuuau

SEQ ID NO: 815893 - RNA, 20 nt, Artificial Sequence
  Synthetic
uuagaagcuguauaccuuau

SEQ ID NO: 815894 - RNA, 20 nt, Artificial Sequence
  Synthetic
acccaucuacucucccuuau

SEQ ID NO: 815895 - RNA, 20 nt, Artificial Sequence
  Synthetic
cauuauucugugagccuuau

SEQ ID NO: 815896 - RNA, 20 nt, Artificial Sequence
  Synthetic
cacuguaauuuccgccuuau

SEQ ID NO: 815897 - RNA, 20 nt, Artificial Sequence
  Synthetic
acccguucccucugccuuau

SEQ ID NO: 815898 - RNA, 20 nt, Artificial Sequence
  Synthetic
uuuacugaguuuugccuuau

SEQ ID NO: 815899 - RNA, 20 nt, Artificial Sequence
  Synthetic
aauguucuauaaauccuuau

SEQ ID NO: 815900 - RNA, 20 nt, Artificial Sequence
  Synthetic
cauuagcgucauuuccuuau

SEQ ID NO: 815901 - RNA, 20 nt, Artificial Sequence
  Synthetic
uaggaggauuucaagcuuau

SEQ ID NO: 815902 - RNA, 20 nt, Artificial Sequence
  Synthetic
uuuauuucucagaagcuuau

SEQ ID NO: 815903 - RNA, 20 nt, Artificial Sequence
  Synthetic
aguaccacuugggagcuuau

SEQ ID NO: 815904 - RNA, 20 nt, Artificial Sequence
  Synthetic
ccuacuugcuuaaugcuuau

SEQ ID NO: 815905 - RNA, 20 nt, Artificial Sequence
  Synthetic
auaugauuuauuaugcuuau

SEQ ID NO: 815906 - RNA, 20 nt, Artificial Sequence
  Synthetic
uugucuucgaaucugcuuau

SEQ ID NO: 815907 - RNA, 20 nt, Artificial Sequence
  Synthetic
cacaugugaccucugcuuau

SEQ ID NO: 815908 - RNA, 20 nt, Artificial Sequence
  Synthetic
cuuuuguugccugugcuuau

SEQ ID NO: 815909 - RNA, 20 nt, Artificial Sequence
  Synthetic
ucuuauuaaagaaaucuuau

SEQ ID NO: 815910 - RNA, 20 nt, Artificial Sequence
  Synthetic
aagguaaaaauaaaucuuau

SEQ ID NO: 815911 - RNA, 20 nt, Artificial Sequence
  Synthetic
aaagauaaaauuaaucuuau

SEQ ID NO: 815912 - RNA, 20 nt, Artificial Sequence
  Synthetic
cccaacuccugcgaucuuau

SEQ ID NO: 815913 - RNA, 20 nt, Artificial Sequence
  Synthetic
aacaagaguaccuaucuuau

SEQ ID NO: 815914 - RNA, 20 nt, Artificial Sequence
  Synthetic
ugcccacaacuguaucuuau

SEQ ID NO: 815915 - RNA, 20 nt, Artificial Sequence
  Synthetic
aaacuuugcuggacucuuau

SEQ ID NO: 815916 - RNA, 20 nt, Artificial Sequence
  Synthetic
acgcagcuauuaucucuuau

SEQ ID NO: 815917 - RNA, 20 nt, Artificial Sequence
  Synthetic
agaugacgugagucucuuau

SEQ ID NO: 815918 - RNA, 20 nt, Artificial Sequence
  Synthetic
aauaauagucagugucuuau

SEQ ID NO: 815919 - RNA, 20 nt, Artificial Sequence
  Synthetic
aacauuucagaaauucuuau

SEQ ID NO: 815920 - RNA, 20 nt, Artificial Sequence
  Synthetic
agucuuuuucagauucuuau

SEQ ID NO: 815921 - RNA, 20 nt, Artificial Sequence
  Synthetic
uuuugccagaagcuucuuau

SEQ ID NO: 815922 - RNA, 20 nt, Artificial Sequence
  Synthetic
uguuuccuaggcuuucuuau

SEQ ID NO: 815923 - RNA, 20 nt, Artificial Sequence
  Synthetic
cggagaugguaguuucuuau

SEQ ID NO: 815924 - RNA, 20 nt, Artificial Sequence
  Synthetic
auaggcccugcaaaaguuau

SEQ ID NO: 815925 - RNA, 20 nt, Artificial Sequence
  Synthetic
auuucauuacacaaaguuau

SEQ ID NO: 815926 - RNA, 20 nt, Artificial Sequence
  Synthetic
ucaauucuagacaaaguuau

SEQ ID NO: 815927 - RNA, 20 nt, Artificial Sequence
  Synthetic
aaagaaagaaugaaaguuau

SEQ ID NO: 815928 - RNA, 20 nt, Artificial Sequence
  Synthetic
aaaaaagguaaccaaguuau

SEQ ID NO: 815929 - RNA, 20 nt, Artificial Sequence
  Synthetic
auuugagucacagaaguuau

SEQ ID NO: 815930 - RNA, 20 nt, Artificial Sequence
  Synthetic
caacuuacaaaauaaguuau

SEQ ID NO: 815931 - RNA, 20 nt, Artificial Sequence
  Synthetic
uuauaauuggauuaaguuau

SEQ ID NO: 815932 - RNA, 20 nt, Artificial Sequence
  Synthetic
auauaugaaucuuaaguuau

SEQ ID NO: 815933 - RNA, 20 nt, Artificial Sequence
  Synthetic
aauaaagggaaaacaguuau

SEQ ID NO: 815934 - RNA, 20 nt, Artificial Sequence
  Synthetic
uucuagaaagaaacaguuau

SEQ ID NO: 815935 - RNA, 20 nt, Artificial Sequence
  Synthetic
uuauucaaaaagacaguuau

SEQ ID NO: 815936 - RNA, 20 nt, Artificial Sequence
  Synthetic
uuucagaaauaaagaguuau

SEQ ID NO: 815937 - RNA, 20 nt, Artificial Sequence
  Synthetic
agggucaaucuaagaguuau

SEQ ID NO: 815938 - RNA, 20 nt, Artificial Sequence
  Synthetic
cuuuggagagcgggaguuau

SEQ ID NO: 815939 - RNA, 20 nt, Artificial Sequence
  Synthetic
uaaaaacagaggggaguuau

SEQ ID NO: 815940 - RNA, 20 nt, Artificial Sequence
  Synthetic
cugaaugagaugggaguuau

SEQ ID NO: 815941 - RNA, 20 nt, Artificial Sequence
  Synthetic
ucacauggacauggaguuau

SEQ ID NO: 815942 - RNA, 20 nt, Artificial Sequence
  Synthetic
auggacuuaauaauaguuau

SEQ ID NO: 815943 - RNA, 20 nt, Artificial Sequence
  Synthetic
ugagugaacaagguaguuau

SEQ ID NO: 815944 - RNA, 20 nt, Artificial Sequence
  Synthetic
ucaauuucagaacucguuau

SEQ ID NO: 815945 - RNA, 20 nt, Artificial Sequence
  Synthetic
uuguauguaguuaagguuau

SEQ ID NO: 815946 - RNA, 20 nt, Artificial Sequence
  Synthetic
uguaacacuaugcagguuau

SEQ ID NO: 815947 - RNA, 20 nt, Artificial Sequence
  Synthetic
ccaggacguguggggguuau

SEQ ID NO: 815948 - RNA, 20 nt, Artificial Sequence
  Synthetic
uucaguuccauguggguuau

SEQ ID NO: 815949 - RNA, 20 nt, Artificial Sequence
  Synthetic
aauguucucuuuuggguuau

SEQ ID NO: 815950 - RNA, 20 nt, Artificial Sequence
  Synthetic
auuucucacacaaugguuau

SEQ ID NO: 815951 - RNA, 20 nt, Artificial Sequence
  Synthetic
uacuaugaaauuaugguuau

SEQ ID NO: 815952 - RNA, 20 nt, Artificial Sequence
  Synthetic
acauaugugguggugguuau

SEQ ID NO: 815953 - RNA, 20 nt, Artificial Sequence
  Synthetic
auaaggaaaguucauguuau

SEQ ID NO: 815954 - RNA, 20 nt, Artificial Sequence
  Synthetic
cuuuauuauauuuauguuau

SEQ ID NO: 815955 - RNA, 20 nt, Artificial Sequence
  Synthetic
ugauaauaaacaacuguuau

SEQ ID NO: 815956 - RNA, 20 nt, Artificial Sequence
  Synthetic
aacaaagaacagacuguuau

SEQ ID NO: 815957 - RNA, 20 nt, Artificial Sequence
  Synthetic
uauuuuuuggcaccuguuau

SEQ ID NO: 815958 - RNA, 20 nt, Artificial Sequence
  Synthetic
acaauuucagagccuguuau

SEQ ID NO: 815959 - RNA, 20 nt, Artificial Sequence
  Synthetic
ucaauuucagagccuguuau

SEQ ID NO: 815960 - RNA, 20 nt, Artificial Sequence
  Synthetic
acaauuucagcuccuguuau

SEQ ID NO: 815961 - RNA, 20 nt, Artificial Sequence
  Synthetic
cuuaacacuaaggcuguuau

SEQ ID NO: 815962 - RNA, 20 nt, Artificial Sequence
  Synthetic
aaaaucuuguuaucuguuau

SEQ ID NO: 815963 - RNA, 20 nt, Artificial Sequence
  Synthetic
ccacagaaguacucuguuau

SEQ ID NO: 815964 - RNA, 20 nt, Artificial Sequence
  Synthetic
uuuggcucucugucuguuau

SEQ ID NO: 815965 - RNA, 20 nt, Artificial Sequence
  Synthetic
aaaucuuaacaaaguguuau

SEQ ID NO: 815966 - RNA, 20 nt, Artificial Sequence
  Synthetic
cagacuaguaaauguguuau

SEQ ID NO: 815967 - RNA, 20 nt, Artificial Sequence
  Synthetic
ucuucuuagauauguguuau

SEQ ID NO: 815968 - RNA, 20 nt, Artificial Sequence
  Synthetic
uuaauuaauaaaauuguuau

SEQ ID NO: 815969 - RNA, 20 nt, Artificial Sequence
  Synthetic
ucaauuucagaacuuguuau

SEQ ID NO: 815970 - RNA, 20 nt, Artificial Sequence
  Synthetic
ccaauucaauuucuuguuau

SEQ ID NO: 815971 - RNA, 20 nt, Artificial Sequence
  Synthetic
caagaaaucauuguuguuau

SEQ ID NO: 815972 - RNA, 20 nt, Artificial Sequence
  Synthetic
aaagacaaaguauuuguuau

SEQ ID NO: 815973 - RNA, 20 nt, Artificial Sequence
  Synthetic
caccaaaaguuauuuguuau

SEQ ID NO: 815974 - RNA, 20 nt, Artificial Sequence
  Synthetic
uuugaagggcauuuuguuau

SEQ ID NO: 815975 - RNA, 20 nt, Artificial Sequence
  Synthetic
aaauggauuuauuuuguuau

SEQ ID NO: 815976 - RNA, 20 nt, Artificial Sequence
  Synthetic
uguuaacaucaaaaauuuau

SEQ ID NO: 815977 - RNA, 20 nt, Artificial Sequence
  Synthetic
ccacaccauuuaaaauuuau

SEQ ID NO: 815978 - RNA, 20 nt, Artificial Sequence
  Synthetic
aaaauaagucacaaauuuau

SEQ ID NO: 815979 - RNA, 20 nt, Artificial Sequence
  Synthetic
aucuguaucuacaaauuuau

SEQ ID NO: 815980 - RNA, 20 nt, Artificial Sequence
  Synthetic
ucuuaauuguauaaauuuau

SEQ ID NO: 815981 - RNA, 20 nt, Artificial Sequence
  Synthetic
agccauuagcguaaauuuau

SEQ ID NO: 815982 - RNA, 20 nt, Artificial Sequence
  Synthetic
acauuauggauuaaauuuau

SEQ ID NO: 815983 - RNA, 20 nt, Artificial Sequence
  Synthetic
aaaauguauucccaauuuau

SEQ ID NO: 815984 - RNA, 20 nt, Artificial Sequence
  Synthetic
acagagugaagucaauuuau

SEQ ID NO: 815985 - RNA, 20 nt, Artificial Sequence
  Synthetic
cucagauuccuagaauuuau

SEQ ID NO: 815986 - RNA, 20 nt, Artificial Sequence
  Synthetic
agaaggaauuucuaauuuau

SEQ ID NO: 815987 - RNA, 20 nt, Artificial Sequence
  Synthetic
aguuuuauaggguaauuuau

SEQ ID NO: 815988 - RNA, 20 nt, Artificial Sequence
  Synthetic
aauuucauauauuaauuuau

SEQ ID NO: 815989 - RNA, 20 nt, Artificial Sequence
  Synthetic
aaccuuaucuauuaauuuau

SEQ ID NO: 815990 - RNA, 20 nt, Artificial Sequence
  Synthetic
uccuacaccauuuaauuuau

SEQ ID NO: 815991 - RNA, 20 nt, Artificial Sequence
  Synthetic
uugaccuaacuaacauuuau

SEQ ID NO: 815992 - RNA, 20 nt, Artificial Sequence
  Synthetic
cacauuucuaauacauuuau

SEQ ID NO: 815993 - RNA, 20 nt, Artificial Sequence
  Synthetic
aaauaauuauauacauuuau

SEQ ID NO: 815994 - RNA, 20 nt, Artificial Sequence
  Synthetic
uuucuuaccauuccauuuau

SEQ ID NO: 815995 - RNA, 20 nt, Artificial Sequence
  Synthetic
ucccagguaauagcauuuau

SEQ ID NO: 815996 - RNA, 20 nt, Artificial Sequence
  Synthetic
uauccuauguaaucauuuau

SEQ ID NO: 815997 - RNA, 20 nt, Artificial Sequence
  Synthetic
uucauggaacuaucauuuau

SEQ ID NO: 815998 - RNA, 20 nt, Artificial Sequence
  Synthetic
cauuugcuucauucauuuau

SEQ ID NO: 815999 - RNA, 20 nt, Artificial Sequence
  Synthetic
uaccaauaagcuucauuuau

SEQ ID NO: 816000 - RNA, 20 nt, Artificial Sequence
  Synthetic
ugaggguacuaaagauuuau

SEQ ID NO: 816001 - RNA, 20 nt, Artificial Sequence
  Synthetic
cacaacaugucaagauuuau

SEQ ID NO: 816002 - RNA, 20 nt, Artificial Sequence
  Synthetic
aaagaaccaggaagauuuau

SEQ ID NO: 816003 - RNA, 20 nt, Artificial Sequence
  Synthetic
uguaggcaucagagauuuau

SEQ ID NO: 816004 - RNA, 20 nt, Artificial Sequence
  Synthetic
caagucauguagagauuuau

SEQ ID NO: 816005 - RNA, 20 nt, Artificial Sequence
  Synthetic
agucaucaugauggauuuau

SEQ ID NO: 816006 - RNA, 20 nt, Artificial Sequence
  Synthetic
ccucuguacugaugauuuau

SEQ ID NO: 816007 - RNA, 20 nt, Artificial Sequence
  Synthetic
uauuugauuagcugauuuau

SEQ ID NO: 816008 - RNA, 20 nt, Artificial Sequence
  Synthetic
agacacugacucugauuuau

SEQ ID NO: 816009 - RNA, 20 nt, Artificial Sequence
  Synthetic
aguuaauuaaaaauauuuau

SEQ ID NO: 816010 - RNA, 20 nt, Artificial Sequence
  Synthetic
ugauauuuuaucauauuuau

SEQ ID NO: 816011 - RNA, 20 nt, Artificial Sequence
  Synthetic
caguagguauauauauuuau

SEQ ID NO: 816012 - RNA, 20 nt, Artificial Sequence
  Synthetic
uguuacauuuauauauuuau

SEQ ID NO: 816013 - RNA, 20 nt, Artificial Sequence
  Synthetic
auuauuauacaacuauuuau

SEQ ID NO: 816014 - RNA, 20 nt, Artificial Sequence
  Synthetic
ugauuuuuggaacuauuuau

SEQ ID NO: 816015 - RNA, 20 nt, Artificial Sequence
  Synthetic
agggauaaaagacuauuuau

SEQ ID NO: 816016 - RNA, 20 nt, Artificial Sequence
  Synthetic
caaauuauacagcuauuuau

SEQ ID NO: 816017 - RNA, 20 nt, Artificial Sequence
  Synthetic
uacuaaacaccaguauuuau

SEQ ID NO: 816018 - RNA, 20 nt, Artificial Sequence
  Synthetic
uaauaacuauauguauuuau

SEQ ID NO: 816019 - RNA, 20 nt, Artificial Sequence
  Synthetic
uaguagguguauguauuuau

SEQ ID NO: 816020 - RNA, 20 nt, Artificial Sequence
  Synthetic
auaaaaaguuaauuauuuau

SEQ ID NO: 816021 - RNA, 20 nt, Artificial Sequence
  Synthetic
auugaggaaaauuuauuuau

SEQ ID NO: 816022 - RNA, 20 nt, Artificial Sequence
  Synthetic
uagcauaacuuucacuuuau

SEQ ID NO: 816023 - RNA, 20 nt, Artificial Sequence
  Synthetic
aaaucaagcugggacuuuau

SEQ ID NO: 816024 - RNA, 20 nt, Artificial Sequence
  Synthetic
auggaugaaaaauacuuuau

SEQ ID NO: 816025 - RNA, 20 nt, Artificial Sequence
  Synthetic
agccucaauagcuacuuuau

SEQ ID NO: 816026 - RNA, 20 nt, Artificial Sequence
  Synthetic
caugauaauauacccuuuau

SEQ ID NO: 816027 - RNA, 20 nt, Artificial Sequence
  Synthetic
auuuaauuaucuagcuuuau

SEQ ID NO: 816028 - RNA, 20 nt, Artificial Sequence
  Synthetic
cagucuguguguagcuuuau

SEQ ID NO: 816029 - RNA, 20 nt, Artificial Sequence
  Synthetic
cuuuuaaccuuaugcuuuau

SEQ ID NO: 816030 - RNA, 20 nt, Artificial Sequence
  Synthetic
cuagauauuuucugcuuuau

SEQ ID NO: 816031 - RNA, 20 nt, Artificial Sequence
  Synthetic
aaauauuuuuacaucuuuau

SEQ ID NO: 816032 - RNA, 20 nt, Artificial Sequence
  Synthetic
uuguccuuuuugaucuuuau

SEQ ID NO: 816033 - RNA, 20 nt, Artificial Sequence
  Synthetic
auaacaaagauuaucuuuau

SEQ ID NO: 816034 - RNA, 20 nt, Artificial Sequence
  Synthetic
agauaaaacaagcucuuuau

SEQ ID NO: 816035 - RNA, 20 nt, Artificial Sequence
  Synthetic
uacauuguauugcucuuuau

SEQ ID NO: 816036 - RNA, 20 nt, Artificial Sequence
  Synthetic
acgugugcaugugucuuuau

SEQ ID NO: 816037 - RNA, 20 nt, Artificial Sequence
  Synthetic
caaaauuuucacuucuuuau

SEQ ID NO: 816038 - RNA, 20 nt, Artificial Sequence
  Synthetic
aacaauccagaguucuuuau

SEQ ID NO: 816039 - RNA, 20 nt, Artificial Sequence
  Synthetic
cgucuaaagcuaaaguuuau

SEQ ID NO: 816040 - RNA, 20 nt, Artificial Sequence
  Synthetic
uggggaagaggccaguuuau

SEQ ID NO: 816041 - RNA, 20 nt, Artificial Sequence
  Synthetic
cugugccaaugucaguuuau

SEQ ID NO: 816042 - RNA, 20 nt, Artificial Sequence
  Synthetic
uaauguauccaugaguuuau

SEQ ID NO: 816043 - RNA, 20 nt, Artificial Sequence
  Synthetic
ugauuccgauacuaguuuau

SEQ ID NO: 816044 - RNA, 20 nt, Artificial Sequence
  Synthetic
agauucuaucacagguuuau

SEQ ID NO: 816045 - RNA, 20 nt, Artificial Sequence
  Synthetic
uuagcagaguguagguuuau

SEQ ID NO: 816046 - RNA, 20 nt, Artificial Sequence
  Synthetic
uuguugaaaccaugguuuau

SEQ ID NO: 816047 - RNA, 20 nt, Artificial Sequence
  Synthetic
auucugcaacugugguuuau

SEQ ID NO: 816048 - RNA, 20 nt, Artificial Sequence
  Synthetic
ucugucuguuauugguuuau

SEQ ID NO: 816049 - RNA, 20 nt, Artificial Sequence
  Synthetic
auaauauuagcuauguuuau

SEQ ID NO: 816050 - RNA, 20 nt, Artificial Sequence
  Synthetic
aaugcuuauacacuguuuau

SEQ ID NO: 816051 - RNA, 20 nt, Artificial Sequence
  Synthetic
cuggauuuuuucuuguuuau

SEQ ID NO: 816052 - RNA, 20 nt, Artificial Sequence
  Synthetic
acuuugcugaauuuguuuau

SEQ ID NO: 816053 - RNA, 20 nt, Artificial Sequence
  Synthetic
ucaaagcuuggaaauuuuau

SEQ ID NO: 816054 - RNA, 20 nt, Artificial Sequence
  Synthetic
uuagcaugaaggaauuuuau

SEQ ID NO: 816055 - RNA, 20 nt, Artificial Sequence
  Synthetic
aaggacaugcauaauuuuau

SEQ ID NO: 816056 - RNA, 20 nt, Artificial Sequence
  Synthetic
cgcucucauuauaauuuuau

SEQ ID NO: 816057 - RNA, 20 nt, Artificial Sequence
  Synthetic
cacaguaugacuaauuuuau

SEQ ID NO: 816058 - RNA, 20 nt, Artificial Sequence
  Synthetic
acccuguccccuaauuuuau

SEQ ID NO: 816059 - RNA, 20 nt, Artificial Sequence
  Synthetic
uugccauuuguuaauuuuau

SEQ ID NO: 816060 - RNA, 20 nt, Artificial Sequence
  Synthetic
cagugcucugaacauuuuau

SEQ ID NO: 816061 - RNA, 20 nt, Artificial Sequence
  Synthetic
uaaauaaauuugcauuuuau

SEQ ID NO: 816062 - RNA, 20 nt, Artificial Sequence
  Synthetic
uuauuaaacaaucauuuuau

SEQ ID NO: 816063 - RNA, 20 nt, Artificial Sequence
  Synthetic
uagauauauaaucauuuuau

SEQ ID NO: 816064 - RNA, 20 nt, Artificial Sequence
  Synthetic
uauuuaacaccagauuuuau

SEQ ID NO: 816065 - RNA, 20 nt, Artificial Sequence
  Synthetic
ccuucauuuggagauuuuau

SEQ ID NO: 816066 - RNA, 20 nt, Artificial Sequence
  Synthetic
aguucuaaaauggauuuuau

SEQ ID NO: 816067 - RNA, 20 nt, Artificial Sequence
  Synthetic
caaguacaguaugauuuuau

SEQ ID NO: 816068 - RNA, 20 nt, Artificial Sequence
  Synthetic
aauguuccaugugauuuuau

SEQ ID NO: 816069 - RNA, 20 nt, Artificial Sequence
  Synthetic
uugaggcuucaguauuuuau

SEQ ID NO: 816070 - RNA, 20 nt, Artificial Sequence
  Synthetic
caagaaguauauuauuuuau

SEQ ID NO: 816071 - RNA, 20 nt, Artificial Sequence
  Synthetic
uuuggucugauuuauuuuau

SEQ ID NO: 816072 - RNA, 20 nt, Artificial Sequence
  Synthetic
uccugagaguuuuauuuuau

SEQ ID NO: 816073 - RNA, 20 nt, Artificial Sequence
  Synthetic
ucuucucagcaaacuuuuau

SEQ ID NO: 816074 - RNA, 20 nt, Artificial Sequence
  Synthetic
ucuugcaaacacacuuuuau

SEQ ID NO: 816075 - RNA, 20 nt, Artificial Sequence
  Synthetic
caugaaacugccacuuuuau

SEQ ID NO: 816076 - RNA, 20 nt, Artificial Sequence
  Synthetic
aggccaaauguuucuuuuau

SEQ ID NO: 816077 - RNA, 20 nt, Artificial Sequence
  Synthetic
uauuuuugcuuuucuuuuau

SEQ ID NO: 816078 - RNA, 20 nt, Artificial Sequence
  Synthetic
ugaaauucagaaaguuuuau

SEQ ID NO: 816079 - RNA, 20 nt, Artificial Sequence
  Synthetic
uuuuguaaauaaaguuuuau

SEQ ID NO: 816080 - RNA, 20 nt, Artificial Sequence
  Synthetic
auuuugaauggaaguuuuau

SEQ ID NO: 816081 - RNA, 20 nt, Artificial Sequence
  Synthetic
aauugcuuuguaaguuuuau

SEQ ID NO: 816082 - RNA, 20 nt, Artificial Sequence
  Synthetic
caaacccuaggcaguuuuau

SEQ ID NO: 816083 - RNA, 20 nt, Artificial Sequence
  Synthetic
acugaaagcaucaguuuuau

SEQ ID NO: 816084 - RNA, 20 nt, Artificial Sequence
  Synthetic
cuggaaauccuccguuuuau

SEQ ID NO: 816085 - RNA, 20 nt, Artificial Sequence
  Synthetic
aauccauaaagagguuuuau

SEQ ID NO: 816086 - RNA, 20 nt, Artificial Sequence
  Synthetic
caagcaaauaaauguuuuau

SEQ ID NO: 816087 - RNA, 20 nt, Artificial Sequence
  Synthetic
aagcuuuuuauuuguuuuau

SEQ ID NO: 816088 - RNA, 20 nt, Artificial Sequence
  Synthetic
acuaaacaauucauuuuuau

SEQ ID NO: 816089 - RNA, 20 nt, Artificial Sequence
  Synthetic
uauucauuuuauauuuuuau

SEQ ID NO: 816090 - RNA, 20 nt, Artificial Sequence
  Synthetic
acuaaacauuuuauuuuuau

SEQ ID NO: 816091 - RNA, 20 nt, Artificial Sequence
  Synthetic
aaauaaaaccuacuuuuuau

SEQ ID NO: 816092 - RNA, 20 nt, Artificial Sequence
  Synthetic
ccuuugcugaugcuuuuuau

SEQ ID NO: 816093 - RNA, 20 nt, Artificial Sequence
  Synthetic
uuucaccagucucuuuuuau

SEQ ID NO: 816094 - RNA, 20 nt, Artificial Sequence
  Synthetic
aaaggaauucuaguuuuuau

SEQ ID NO: 816095 - RNA, 20 nt, Artificial Sequence
  Synthetic
uuaaauguaauuguuuuuau

SEQ ID NO: 816096 - RNA, 20 nt, Artificial Sequence
  Synthetic
uaaccauacuaauuuuuuau

SEQ ID NO: 816097 - RNA, 20 nt, Artificial Sequence
  Synthetic
acuaaaauaaucuuuuuuau

SEQ ID NO: 816098 - RNA, 20 nt, Artificial Sequence
  Synthetic
uauuguuuuuuguuuuuuau

SEQ ID NO: 816099 - RNA, 20 nt, Artificial Sequence
  Synthetic
agccuuuaaauuuuuuuuau

SEQ ID NO: 816100 - RNA, 20 nt, Artificial Sequence
  Synthetic
aauaggcaaaaaaaaaaacu

SEQ ID NO: 816101 - RNA, 20 nt, Artificial Sequence
  Synthetic
uggcaguacuuaaaaaaacu

SEQ ID NO: 816102 - RNA, 20 nt, Artificial Sequence
  Synthetic
uuaaaggugaucaaaaaacu

SEQ ID NO: 816103 - RNA, 20 nt, Artificial Sequence
  Synthetic
auuaccuuugugaaaaaacu

SEQ ID NO: 816104 - RNA, 20 nt, Artificial Sequence
  Synthetic
caugagaggaauaaaaaacu

SEQ ID NO: 816105 - RNA, 20 nt, Artificial Sequence
  Synthetic
uuuuuauuugaacaaaaacu

SEQ ID NO: 816106 - RNA, 20 nt, Artificial Sequence
  Synthetic
ucacugauucaccaaaaacu

SEQ ID NO: 816107 - RNA, 20 nt, Artificial Sequence
  Synthetic
auaugucucugccaaaaacu

SEQ ID NO: 816108 - RNA, 20 nt, Artificial Sequence
  Synthetic
aaaagcaaaaagcaaaaacu

SEQ ID NO: 816109 - RNA, 20 nt, Artificial Sequence
  Synthetic
agauaaagccugcaaaaacu

SEQ ID NO: 816110 - RNA, 20 nt, Artificial Sequence
  Synthetic
ucuauuguuauuuaaaaacu

SEQ ID NO: 816111 - RNA, 20 nt, Artificial Sequence
  Synthetic
agaguagaguuuuaaaaacu

SEQ ID NO: 816112 - RNA, 20 nt, Artificial Sequence
  Synthetic
uucauaagcaaaacaaaacu

SEQ ID NO: 816113 - RNA, 20 nt, Artificial Sequence
  Synthetic
cauagcucuccaacaaaacu

SEQ ID NO: 816114 - RNA, 20 nt, Artificial Sequence
  Synthetic
aguuuacagaugacaaaacu

SEQ ID NO: 816115 - RNA, 20 nt, Artificial Sequence
  Synthetic
ucaauccaaacuacaaaacu

SEQ ID NO: 816116 - RNA, 20 nt, Artificial Sequence
  Synthetic
aaagaaccuuuagcaaaacu

SEQ ID NO: 816117 - RNA, 20 nt, Artificial Sequence
  Synthetic
cuuuuccauagcagaaaacu

SEQ ID NO: 816118 - RNA, 20 nt, Artificial Sequence
  Synthetic
cuuauuuuauagagaaaacu

SEQ ID NO: 816119 - RNA, 20 nt, Artificial Sequence
  Synthetic
auugagaguuagagaaaacu

SEQ ID NO: 816120 - RNA, 20 nt, Artificial Sequence
  Synthetic
auaaaaacuaugagaaaacu

SEQ ID NO: 816121 - RNA, 20 nt, Artificial Sequence
  Synthetic
aacauucgagcaggaaaacu

SEQ ID NO: 816122 - RNA, 20 nt, Artificial Sequence
  Synthetic
uucagagaaacgugaaaacu

SEQ ID NO: 816123 - RNA, 20 nt, Artificial Sequence
  Synthetic
uuugugaagacuugaaaacu

SEQ ID NO: 816124 - RNA, 20 nt, Artificial Sequence
  Synthetic
aagugacaaagaauaaaacu

SEQ ID NO: 816125 - RNA, 20 nt, Artificial Sequence
  Synthetic
uaaaucuaaauaauaaaacu

SEQ ID NO: 816126 - RNA, 20 nt, Artificial Sequence
  Synthetic
uacauaacauagauaaaacu

SEQ ID NO: 816127 - RNA, 20 nt, Artificial Sequence
  Synthetic
ucauuuggugauauaaaacu

SEQ ID NO: 816128 - RNA, 20 nt, Artificial Sequence
  Synthetic
auuuucucaucuguaaaacu

SEQ ID NO: 816129 - RNA, 20 nt, Artificial Sequence
  Synthetic
ccugcaaaaugauuaaaacu

SEQ ID NO: 816130 - RNA, 20 nt, Artificial Sequence
  Synthetic
aacgacucccucuuaaaacu

SEQ ID NO: 816131 - RNA, 20 nt, Artificial Sequence
  Synthetic
ccauuauauauuuuaaaacu

SEQ ID NO: 816132 - RNA, 20 nt, Artificial Sequence
  Synthetic
auaaaaacacacaacaaacu

SEQ ID NO: 816133 - RNA, 20 nt, Artificial Sequence
  Synthetic
ucaccucuauggcacaaacu

SEQ ID NO: 816134 - RNA, 20 nt, Artificial Sequence
  Synthetic
auugcagcugaagacaaacu

SEQ ID NO: 816135 - RNA, 20 nt, Artificial Sequence
  Synthetic
augaaaagcaaggacaaacu

SEQ ID NO: 816136 - RNA, 20 nt, Artificial Sequence
  Synthetic
aguagcugggacuacaaacu

SEQ ID NO: 816137 - RNA, 20 nt, Artificial Sequence
  Synthetic
cgcuccuuaccucccaaacu

SEQ ID NO: 816138 - RNA, 20 nt, Artificial Sequence
  Synthetic
uuuuaagauugguccaaacu

SEQ ID NO: 816139 - RNA, 20 nt, Artificial Sequence
  Synthetic
uuuacauuuuguggcaaacu

SEQ ID NO: 816140 - RNA, 20 nt, Artificial Sequence
  Synthetic
acuauuuguuaaugcaaacu

SEQ ID NO: 816141 - RNA, 20 nt, Artificial Sequence
  Synthetic
ugcccgacugccuucaaacu

SEQ ID NO: 816142 - RNA, 20 nt, Artificial Sequence
  Synthetic
uuuauuaaggauuucaaacu

SEQ ID NO: 816143 - RNA, 20 nt, Artificial Sequence
  Synthetic
aggcuuagacuuuucaaacu

SEQ ID NO: 816144 - RNA, 20 nt, Artificial Sequence
  Synthetic
uugacaaucguuuucaaacu

SEQ ID NO: 816145 - RNA, 20 nt, Artificial Sequence
  Synthetic
ugacuggaugagaagaaacu

SEQ ID NO: 816146 - RNA, 20 nt, Artificial Sequence
  Synthetic
cacuccagagauaagaaacu

SEQ ID NO: 816147 - RNA, 20 nt, Artificial Sequence
  Synthetic
cuucuacaaaaacagaaacu

SEQ ID NO: 816148 - RNA, 20 nt, Artificial Sequence
  Synthetic
cagcacaaaaagcagaaacu

SEQ ID NO: 816149 - RNA, 20 nt, Artificial Sequence
  Synthetic
ccaacaaaccaucagaaacu

SEQ ID NO: 816150 - RNA, 20 nt, Artificial Sequence
  Synthetic
auacacacauaucagaaacu

SEQ ID NO: 816151 - RNA, 20 nt, Artificial Sequence
  Synthetic
auguuguucuaucagaaacu

SEQ ID NO: 816152 - RNA, 20 nt, Artificial Sequence
  Synthetic
cagguccaaacagagaaacu

SEQ ID NO: 816153 - RNA, 20 nt, Artificial Sequence
  Synthetic
aacuccugaauagagaaacu

SEQ ID NO: 816154 - RNA, 20 nt, Artificial Sequence
  Synthetic
aauucuccugaauagaaacu

SEQ ID NO: 816155 - RNA, 20 nt, Artificial Sequence
  Synthetic
agauggcaacaguagaaacu

SEQ ID NO: 816156 - RNA, 20 nt, Artificial Sequence
  Synthetic
uuaggcuaagguuagaaacu

SEQ ID NO: 816157 - RNA, 20 nt, Artificial Sequence
  Synthetic
uuccuguugguuuagaaacu

SEQ ID NO: 816158 - RNA, 20 nt, Artificial Sequence
  Synthetic
ccuaaagcaucaaggaaacu

SEQ ID NO: 816159 - RNA, 20 nt, Artificial Sequence
  Synthetic
uagcaucagaugaggaaacu

SEQ ID NO: 816160 - RNA, 20 nt, Artificial Sequence
  Synthetic
augcuuaccucuaggaaacu

SEQ ID NO: 816161 - RNA, 20 nt, Artificial Sequence
  Synthetic
aauagaacagaagggaaacu

SEQ ID NO: 816162 - RNA, 20 nt, Artificial Sequence
  Synthetic
aaaugucaaugggggaaacu

SEQ ID NO: 816163 - RNA, 20 nt, Artificial Sequence
  Synthetic
uuguuugaaacauggaaacu

SEQ ID NO: 816164 - RNA, 20 nt, Artificial Sequence
  Synthetic
ccaugaaucacuuggaaacu

SEQ ID NO: 816165 - RNA, 20 nt, Artificial Sequence
  Synthetic
auaaagaaauaccugaaacu

SEQ ID NO: 816166 - RNA, 20 nt, Artificial Sequence
  Synthetic
agagcaggaugucugaaacu

SEQ ID NO: 816167 - RNA, 20 nt, Artificial Sequence
  Synthetic
auaaaacuucuugugaaacu

SEQ ID NO: 816168 - RNA, 20 nt, Artificial Sequence
  Synthetic
caugagaauugcuugaaacu

SEQ ID NO: 816169 - RNA, 20 nt, Artificial Sequence
  Synthetic
aagcagaaaauguugaaacu

SEQ ID NO: 816170 - RNA, 20 nt, Artificial Sequence
  Synthetic
aacacucauagaaauaaacu

SEQ ID NO: 816171 - RNA, 20 nt, Artificial Sequence
  Synthetic
uagguuaagugaaauaaacu

SEQ ID NO: 816172 - RNA, 20 nt, Artificial Sequence
  Synthetic
aaagaacuagcuaauaaacu

SEQ ID NO: 816173 - RNA, 20 nt, Artificial Sequence
  Synthetic
aaggggaaugguaauaaacu

SEQ ID NO: 816174 - RNA, 20 nt, Artificial Sequence
  Synthetic
auuuuauagcuagauaaacu

SEQ ID NO: 816175 - RNA, 20 nt, Artificial Sequence
  Synthetic
aagaauaacagggauaaacu

SEQ ID NO: 816176 - RNA, 20 nt, Artificial Sequence
  Synthetic
agcugaagagcagcuaaacu

SEQ ID NO: 816177 - RNA, 20 nt, Artificial Sequence
  Synthetic
aaaauaaaaccugcuaaacu

SEQ ID NO: 816178 - RNA, 20 nt, Artificial Sequence
  Synthetic
cauauccuguuugcuaaacu

SEQ ID NO: 816179 - RNA, 20 nt, Artificial Sequence
  Synthetic
aaacaaucauacaguaaacu

SEQ ID NO: 816180 - RNA, 20 nt, Artificial Sequence
  Synthetic
ucuugaccaaucaguaaacu

SEQ ID NO: 816181 - RNA, 20 nt, Artificial Sequence
  Synthetic
uuccaguagaagaguaaacu

SEQ ID NO: 816182 - RNA, 20 nt, Artificial Sequence
  Synthetic
auuucuucuugauuuaaacu

SEQ ID NO: 816183 - RNA, 20 nt, Artificial Sequence
  Synthetic
ugguguuugaccaaacaacu

SEQ ID NO: 816184 - RNA, 20 nt, Artificial Sequence
  Synthetic
aauguguuacauaaacaacu

SEQ ID NO: 816185 - RNA, 20 nt, Artificial Sequence
  Synthetic
aaaaauauaaauccacaacu

SEQ ID NO: 816186 - RNA, 20 nt, Artificial Sequence
  Synthetic
aacagguggugagcacaacu

SEQ ID NO: 816187 - RNA, 20 nt, Artificial Sequence
  Synthetic
uuuccuuugcauucacaacu

SEQ ID NO: 816188 - RNA, 20 nt, Artificial Sequence
  Synthetic
auuuuaucacaaggacaacu

SEQ ID NO: 816189 - RNA, 20 nt, Artificial Sequence
  Synthetic
cugagaguggaaggacaacu

SEQ ID NO: 816190 - RNA, 20 nt, Artificial Sequence
  Synthetic
ccuuuaucugcaggacaacu

SEQ ID NO: 816191 - RNA, 20 nt, Artificial Sequence
  Synthetic
aauuaaaacaaaugacaacu

SEQ ID NO: 816192 - RNA, 20 nt, Artificial Sequence
  Synthetic
auaauaggcuuaugacaacu

SEQ ID NO: 816193 - RNA, 20 nt, Artificial Sequence
  Synthetic
aacauauugaccugacaacu

SEQ ID NO: 816194 - RNA, 20 nt, Artificial Sequence
  Synthetic
ucauaaguaauaauacaacu

SEQ ID NO: 816195 - RNA, 20 nt, Artificial Sequence
  Synthetic
cccuucaauacccaccaacu

SEQ ID NO: 816196 - RNA, 20 nt, Artificial Sequence
  Synthetic
cauucugaugacucccaacu

SEQ ID NO: 816197 - RNA, 20 nt, Artificial Sequence
  Synthetic
caagaccagccuagccaacu

SEQ ID NO: 816198 - RNA, 20 nt, Artificial Sequence
  Synthetic
aaucaaauguuuagccaacu

SEQ ID NO: 816199 - RNA, 20 nt, Artificial Sequence
  Synthetic
agcuggcuuacacuccaacu

SEQ ID NO: 816200 - RNA, 20 nt, Artificial Sequence
  Synthetic
uaauucaauuaccuccaacu

SEQ ID NO: 816201 - RNA, 20 nt, Artificial Sequence
  Synthetic
uucugcucuugucuccaacu

SEQ ID NO: 816202 - RNA, 20 nt, Artificial Sequence
  Synthetic
cugaagaguguuuuccaacu

SEQ ID NO: 816203 - RNA, 20 nt, Artificial Sequence
  Synthetic
cugcagaguguuuuccaacu

SEQ ID NO: 816204 - RNA, 20 nt, Artificial Sequence
  Synthetic
aauaguauagaaaagcaacu

SEQ ID NO: 816205 - RNA, 20 nt, Artificial Sequence
  Synthetic
agauaacaaucccagcaacu

SEQ ID NO: 816206 - RNA, 20 nt, Artificial Sequence
  Synthetic
ccagcagcaaccuagcaacu

SEQ ID NO: 816207 - RNA, 20 nt, Artificial Sequence
  Synthetic
agauuuauguaauggcaacu

SEQ ID NO: 816208 - RNA, 20 nt, Artificial Sequence
  Synthetic
uuugagagaaaacugcaacu

SEQ ID NO: 816209 - RNA, 20 nt, Artificial Sequence
  Synthetic
accauuuuaccuaaucaacu

SEQ ID NO: 816210 - RNA, 20 nt, Artificial Sequence
  Synthetic
auaauuugauagcaucaacu

SEQ ID NO: 816211 - RNA, 20 nt, Artificial Sequence
  Synthetic
ugagaccagccugaucaacu

SEQ ID NO: 816212 - RNA, 20 nt, Artificial Sequence
  Synthetic
cuguuuuuccccacucaacu

SEQ ID NO: 816213 - RNA, 20 nt, Artificial Sequence
  Synthetic
ugauaaaauccagcucaacu

SEQ ID NO: 816214 - RNA, 20 nt, Artificial Sequence
  Synthetic
cagacauacagagcucaacu

SEQ ID NO: 816215 - RNA, 20 nt, Artificial Sequence
  Synthetic
aaauauucucauucucaacu

SEQ ID NO: 816216 - RNA, 20 nt, Artificial Sequence
  Synthetic
auaugaauuuugugucaacu

SEQ ID NO: 816217 - RNA, 20 nt, Artificial Sequence
  Synthetic
cucacucuucauauucaacu

SEQ ID NO: 816218 - RNA, 20 nt, Artificial Sequence
  Synthetic
aaagggauaaaccuucaacu

SEQ ID NO: 816219 - RNA, 20 nt, Artificial Sequence
  Synthetic
agccaccaguguguucaacu

SEQ ID NO: 816220 - RNA, 20 nt, Artificial Sequence
  Synthetic
accuuugguaaauuucaacu

SEQ ID NO: 816221 - RNA, 20 nt, Artificial Sequence
  Synthetic
uuuuuuccuucauuucaacu

SEQ ID NO: 816222 - RNA, 20 nt, Artificial Sequence
  Synthetic
uagaccagugauuuucaacu

SEQ ID NO: 816223 - RNA, 20 nt, Artificial Sequence
  Synthetic
cauauuuuauuuuuucaacu

SEQ ID NO: 816224 - RNA, 20 nt, Artificial Sequence
  Synthetic
uuuuuuuuuuuuuuucaacu

SEQ ID NO: 816225 - RNA, 20 nt, Artificial Sequence
  Synthetic
uaauaacagguaaaagaacu

SEQ ID NO: 816226 - RNA, 20 nt, Artificial Sequence
  Synthetic
agguagcauuaacaagaacu

SEQ ID NO: 816227 - RNA, 20 nt, Artificial Sequence
  Synthetic
uauuguuacuaucaagaacu

SEQ ID NO: 816228 - RNA, 20 nt, Artificial Sequence
  Synthetic
auaugagaguaagaagaacu

SEQ ID NO: 816229 - RNA, 20 nt, Artificial Sequence
  Synthetic
ucuauacuuugcgaagaacu

SEQ ID NO: 816230 - RNA, 20 nt, Artificial Sequence
  Synthetic
ucuaggcagagggaagaacu

SEQ ID NO: 816231 - RNA, 20 nt, Artificial Sequence
  Synthetic
cagccauuaugauaagaacu

SEQ ID NO: 816232 - RNA, 20 nt, Artificial Sequence
  Synthetic
augacuuuuaucuaagaacu

SEQ ID NO: 816233 - RNA, 20 nt, Artificial Sequence
  Synthetic
cagguuuaggccacagaacu

SEQ ID NO: 816234 - RNA, 20 nt, Artificial Sequence
  Synthetic
uuaaugucuucuacagaacu

SEQ ID NO: 816235 - RNA, 20 nt, Artificial Sequence
  Synthetic
uucaaaagguuuacagaacu

SEQ ID NO: 816236 - RNA, 20 nt, Artificial Sequence
  Synthetic
uacugcgcccggccagaacu

SEQ ID NO: 816237 - RNA, 20 nt, Artificial Sequence
  Synthetic
acacauacguugccagaacu

SEQ ID NO: 816238 - RNA, 20 nt, Artificial Sequence
  Synthetic
uggugaaugcugagagaacu

SEQ ID NO: 816239 - RNA, 20 nt, Artificial Sequence
  Synthetic
aagguaauuaacugagaacu

SEQ ID NO: 816240 - RNA, 20 nt, Artificial Sequence
  Synthetic
caaacaccacugugagaacu

SEQ ID NO: 816241 - RNA, 20 nt, Artificial Sequence
  Synthetic
uaaagacaccagcuagaacu

SEQ ID NO: 816242 - RNA, 20 nt, Artificial Sequence
  Synthetic
aauuccaaguacuuagaacu

SEQ ID NO: 816243 - RNA, 20 nt, Artificial Sequence
  Synthetic
ccauuuccuugcuuagaacu

SEQ ID NO: 816244 - RNA, 20 nt, Artificial Sequence
  Synthetic
agcugauaaguguuagaacu

SEQ ID NO: 816245 - RNA, 20 nt, Artificial Sequence
  Synthetic
cucuuaauugauuccgaacu

SEQ ID NO: 816246 - RNA, 20 nt, Artificial Sequence
  Synthetic
acaaggcagaacaaggaacu

SEQ ID NO: 816247 - RNA, 20 nt, Artificial Sequence
  Synthetic
ugugagaaucugaaggaacu

SEQ ID NO: 816248 - RNA, 20 nt, Artificial Sequence
  Synthetic
agaaaugcuauccaggaacu

SEQ ID NO: 816249 - RNA, 20 nt, Artificial Sequence
  Synthetic
auacuuuguaaauaggaacu

SEQ ID NO: 816250 - RNA, 20 nt, Artificial Sequence
  Synthetic
agacagaugcccugggaacu

SEQ ID NO: 816251 - RNA, 20 nt, Artificial Sequence
  Synthetic
aauuucugcaggugggaacu

SEQ ID NO: 816252 - RNA, 20 nt, Artificial Sequence
  Synthetic
uaaguuuuuuuuguggaacu

SEQ ID NO: 816253 - RNA, 20 nt, Artificial Sequence
  Synthetic
uguggaagugacuuggaacu

SEQ ID NO: 816254 - RNA, 20 nt, Artificial Sequence
  Synthetic
ccuaagccccuccaugaacu

SEQ ID NO: 816255 - RNA, 20 nt, Artificial Sequence
  Synthetic
ccuggggaaaggcaugaacu

SEQ ID NO: 816256 - RNA, 20 nt, Artificial Sequence
  Synthetic
cuucacauaauucaugaacu

SEQ ID NO: 816257 - RNA, 20 nt, Artificial Sequence
  Synthetic
aaaauaugcugcuaugaacu

SEQ ID NO: 816258 - RNA, 20 nt, Artificial Sequence
  Synthetic
cucaguccagccacugaacu

SEQ ID NO: 816259 - RNA, 20 nt, Artificial Sequence
  Synthetic
ugcaaagaggugccugaacu

SEQ ID NO: 816260 - RNA, 20 nt, Artificial Sequence
  Synthetic
caguccuacaguccugaacu

SEQ ID NO: 816261 - RNA, 20 nt, Artificial Sequence
  Synthetic
ucucauuuugauucugaacu

SEQ ID NO: 816262 - RNA, 20 nt, Artificial Sequence
  Synthetic
uauaaugucauuucugaacu

SEQ ID NO: 816263 - RNA, 20 nt, Artificial Sequence
  Synthetic
aguggaggagggagugaacu

SEQ ID NO: 816264 - RNA, 20 nt, Artificial Sequence
  Synthetic
ucugacugugcuagugaacu

SEQ ID NO: 816265 - RNA, 20 nt, Artificial Sequence
  Synthetic
uagaaggcuuuccgugaacu

SEQ ID NO: 816266 - RNA, 20 nt, Artificial Sequence
  Synthetic
aucagucccugaggugaacu

SEQ ID NO: 816267 - RNA, 20 nt, Artificial Sequence
  Synthetic
aguugauuuaauggugaacu

SEQ ID NO: 816268 - RNA, 20 nt, Artificial Sequence
  Synthetic
gcaggagaaucacuugaacu

SEQ ID NO: 816269 - RNA, 20 nt, Artificial Sequence
  Synthetic
aauguucuaauucuugaacu

SEQ ID NO: 816270 - RNA, 20 nt, Artificial Sequence
  Synthetic
ccugugauuacuuuugaacu

SEQ ID NO: 816271 - RNA, 20 nt, Artificial Sequence
  Synthetic
ccuccgccucccaaauaacu

SEQ ID NO: 816272 - RNA, 20 nt, Artificial Sequence
  Synthetic
uaauaugcauagaaauaacu

SEQ ID NO: 816273 - RNA, 20 nt, Artificial Sequence
  Synthetic
aauguguaccaacaauaacu

SEQ ID NO: 816274 - RNA, 20 nt, Artificial Sequence
  Synthetic
caaaacugagaccaauaacu

SEQ ID NO: 816275 - RNA, 20 nt, Artificial Sequence
  Synthetic
aauaauaauaaucaauaacu

SEQ ID NO: 816276 - RNA, 20 nt, Artificial Sequence
  Synthetic
uugauuuuuauucaauaacu

SEQ ID NO: 816277 - RNA, 20 nt, Artificial Sequence
  Synthetic
uuuuccacacaguaauaacu

SEQ ID NO: 816278 - RNA, 20 nt, Artificial Sequence
  Synthetic
aaugaugacuauuaauaacu

SEQ ID NO: 816279 - RNA, 20 nt, Artificial Sequence
  Synthetic
caggggagaggcucauaacu

SEQ ID NO: 816280 - RNA, 20 nt, Artificial Sequence
  Synthetic
uccacauuccagucauaacu

SEQ ID NO: 816281 - RNA, 20 nt, Artificial Sequence
  Synthetic
caguugauaaacagauaacu

SEQ ID NO: 816282 - RNA, 20 nt, Artificial Sequence
  Synthetic
cugaguuacaacagauaacu

SEQ ID NO: 816283 - RNA, 20 nt, Artificial Sequence
  Synthetic
agcuagcaaaugauauaacu

SEQ ID NO: 816284 - RNA, 20 nt, Artificial Sequence
  Synthetic
augcagccuuucguauaacu

SEQ ID NO: 816285 - RNA, 20 nt, Artificial Sequence
  Synthetic
uguuuaaugccuguauaacu

SEQ ID NO: 816286 - RNA, 20 nt, Artificial Sequence
  Synthetic
aauuuuaaaucauuauaacu

SEQ ID NO: 816287 - RNA, 20 nt, Artificial Sequence
  Synthetic
aaaucauacauauuauaacu

SEQ ID NO: 816288 - RNA, 20 nt, Artificial Sequence
  Synthetic
uuuuauaauauguuauaacu

SEQ ID NO: 816289 - RNA, 20 nt, Artificial Sequence
  Synthetic
uuuuauugcuauuuauaacu

SEQ ID NO: 816290 - RNA, 20 nt, Artificial Sequence
  Synthetic
aucaccaagauuuuauaacu

SEQ ID NO: 816291 - RNA, 20 nt, Artificial Sequence
  Synthetic
uaaagcaugguuuuauaacu

SEQ ID NO: 816292 - RNA, 20 nt, Artificial Sequence
  Synthetic
uucaauagcagaaacuaacu

SEQ ID NO: 816293 - RNA, 20 nt, Artificial Sequence
  Synthetic
aaaaaaaaaaaauacuaacu

SEQ ID NO: 816294 - RNA, 20 nt, Artificial Sequence
  Synthetic
ugaguauuaagauacuaacu

SEQ ID NO: 816295 - RNA, 20 nt, Artificial Sequence
  Synthetic
uugcuagcuggcuucuaacu

SEQ ID NO: 816296 - RNA, 20 nt, Artificial Sequence
  Synthetic
acuaauucaaauuucuaacu

SEQ ID NO: 816297 - RNA, 20 nt, Artificial Sequence
  Synthetic
agaccaguugaaaaguaacu

SEQ ID NO: 816298 - RNA, 20 nt, Artificial Sequence
  Synthetic
ccucagccucccgaguaacu

SEQ ID NO: 816299 - RNA, 20 nt, Artificial Sequence
  Synthetic
uguuuucucauuuaguaacu

SEQ ID NO: 816300 - RNA, 20 nt, Artificial Sequence
  Synthetic
acuuuucaggugagguaacu

SEQ ID NO: 816301 - RNA, 20 nt, Artificial Sequence
  Synthetic
caauuuguuuugauguaacu

SEQ ID NO: 816302 - RNA, 20 nt, Artificial Sequence
  Synthetic
uauuugguuaauauguaacu

SEQ ID NO: 816303 - RNA, 20 nt, Artificial Sequence
  Synthetic
ugaggagaacugcuguaacu

SEQ ID NO: 816304 - RNA, 20 nt, Artificial Sequence
  Synthetic
uauuaugaaguuguguaacu

SEQ ID NO: 816305 - RNA, 20 nt, Artificial Sequence
  Synthetic
aagagguuuggcuuguaacu

SEQ ID NO: 816306 - RNA, 20 nt, Artificial Sequence
  Synthetic
ccuugagacacuuuguaacu

SEQ ID NO: 816307 - RNA, 20 nt, Artificial Sequence
  Synthetic
uucacugucauuuuguaacu

SEQ ID NO: 816308 - RNA, 20 nt, Artificial Sequence
  Synthetic
aaaaauacaaaaaauuaacu

SEQ ID NO: 816309 - RNA, 20 nt, Artificial Sequence
  Synthetic
aaagaauucaaaaauuaacu

SEQ ID NO: 816310 - RNA, 20 nt, Artificial Sequence
  Synthetic
uauauguagaaaaauuaacu

SEQ ID NO: 816311 - RNA, 20 nt, Artificial Sequence
  Synthetic
uuuaggaaagagaauuaacu

SEQ ID NO: 816312 - RNA, 20 nt, Artificial Sequence
  Synthetic
acagaagucauccauuaacu

SEQ ID NO: 816313 - RNA, 20 nt, Artificial Sequence
  Synthetic
caugaaauaacucauuaacu

SEQ ID NO: 816314 - RNA, 20 nt, Artificial Sequence
  Synthetic
cugcagcaaaaugauuaacu

SEQ ID NO: 816315 - RNA, 20 nt, Artificial Sequence
  Synthetic
ucguugaacaaauauuaacu

SEQ ID NO: 816316 - RNA, 20 nt, Artificial Sequence
  Synthetic
cauuaaaguacuuauuaacu

SEQ ID NO: 816317 - RNA, 20 nt, Artificial Sequence
  Synthetic
aauaauugaagcaguuaacu

SEQ ID NO: 816318 - RNA, 20 nt, Artificial Sequence
  Synthetic
aaaugacuaaucaguuaacu

SEQ ID NO: 816319 - RNA, 20 nt, Artificial Sequence
  Synthetic
uuguauguagaagguuaacu

SEQ ID NO: 816320 - RNA, 20 nt, Artificial Sequence
  Synthetic
uuugccuaagcagguuaacu

SEQ ID NO: 816321 - RNA, 20 nt, Artificial Sequence
  Synthetic
agaaacuuugaggguuaacu

SEQ ID NO: 816322 - RNA, 20 nt, Artificial Sequence
  Synthetic
auuaaauucaaauguuaacu

SEQ ID NO: 816323 - RNA, 20 nt, Artificial Sequence
  Synthetic
caaauaaauccauguuaacu

SEQ ID NO: 816324 - RNA, 20 nt, Artificial Sequence
  Synthetic
uagaaaauuuaaauuuaacu

SEQ ID NO: 816325 - RNA, 20 nt, Artificial Sequence
  Synthetic
cuaaaauucucccuuuaacu

SEQ ID NO: 816326 - RNA, 20 nt, Artificial Sequence
  Synthetic
ugcuuaaaguagcuuuaacu

SEQ ID NO: 816327 - RNA, 20 nt, Artificial Sequence
  Synthetic
aaaaaauucuucuuuuaacu

SEQ ID NO: 816328 - RNA, 20 nt, Artificial Sequence
  Synthetic
cagagggaguacaaaacacu

SEQ ID NO: 816329 - RNA, 20 nt, Artificial Sequence
  Synthetic
uaucccuuauccaaaacacu

SEQ ID NO: 816330 - RNA, 20 nt, Artificial Sequence
  Synthetic
cagagcaaaugcaaaacacu

SEQ ID NO: 816331 - RNA, 20 nt, Artificial Sequence
  Synthetic
aagaaaaaccucaaaacacu

SEQ ID NO: 816332 - RNA, 20 nt, Artificial Sequence
  Synthetic
agcaacuuuaagaaaacacu

SEQ ID NO: 816333 - RNA, 20 nt, Artificial Sequence
  Synthetic
aaaauaguauggaaaacacu

SEQ ID NO: 816334 - RNA, 20 nt, Artificial Sequence
  Synthetic
aauugaacaaugaaaacacu

SEQ ID NO: 816335 - RNA, 20 nt, Artificial Sequence
  Synthetic
auguccagagugaaaacacu

SEQ ID NO: 816336 - RNA, 20 nt, Artificial Sequence
  Synthetic
auugagcuacguaaaacacu

SEQ ID NO: 816337 - RNA, 20 nt, Artificial Sequence
  Synthetic
cauuuuaucugagaaacacu

SEQ ID NO: 816338 - RNA, 20 nt, Artificial Sequence
  Synthetic
cucaagaaucuauaaacacu

SEQ ID NO: 816339 - RNA, 20 nt, Artificial Sequence
  Synthetic
uggaacacuuguuaaacacu

SEQ ID NO: 816340 - RNA, 20 nt, Artificial Sequence
  Synthetic
acacuaguaaucccaacacu

SEQ ID NO: 816341 - RNA, 20 nt, Artificial Sequence
  Synthetic
caggccccaccuccaacacu

SEQ ID NO: 816342 - RNA, 20 nt, Artificial Sequence
  Synthetic
caggccccaaguccaacacu

SEQ ID NO: 816343 - RNA, 20 nt, Artificial Sequence
  Synthetic
caauugugauucucaacacu

SEQ ID NO: 816344 - RNA, 20 nt, Artificial Sequence
  Synthetic
aaugcuaauuucucaacacu

SEQ ID NO: 816345 - RNA, 20 nt, Artificial Sequence
  Synthetic
auacaaaaaucgucaacacu

SEQ ID NO: 816346 - RNA, 20 nt, Artificial Sequence
  Synthetic
cguaagugguaaagaacacu

SEQ ID NO: 816347 - RNA, 20 nt, Artificial Sequence
  Synthetic
aauugagcaaugagaacacu

SEQ ID NO: 816348 - RNA, 20 nt, Artificial Sequence
  Synthetic
uauuccaauaauggaacacu

SEQ ID NO: 816349 - RNA, 20 nt, Artificial Sequence
  Synthetic
ugcuucucuuuaugaacacu

SEQ ID NO: 816350 - RNA, 20 nt, Artificial Sequence
  Synthetic
aaucaaaacaacugaacacu

SEQ ID NO: 816351 - RNA, 20 nt, Artificial Sequence
  Synthetic
augagucuaggaaacacacu

SEQ ID NO: 816352 - RNA, 20 nt, Artificial Sequence
  Synthetic
agaggggaauaacacacacu

SEQ ID NO: 816353 - RNA, 20 nt, Artificial Sequence
  Synthetic
cacacagacacacacacacu

SEQ ID NO: 816354 - RNA, 20 nt, Artificial Sequence
  Synthetic
cgcaggcaacaucacacacu

SEQ ID NO: 816355 - RNA, 20 nt, Artificial Sequence
  Synthetic
ugcugauugagaaccacacu

SEQ ID NO: 816356 - RNA, 20 nt, Artificial Sequence
  Synthetic
aucucuuuucccaccacacu

SEQ ID NO: 816357 - RNA, 20 nt, Artificial Sequence
  Synthetic
uccuugugcuucagcacacu

SEQ ID NO: 816358 - RNA, 20 nt, Artificial Sequence
  Synthetic
auuaaacaaaaaugcacacu

SEQ ID NO: 816359 - RNA, 20 nt, Artificial Sequence
  Synthetic
accaauuucaccugcacacu

SEQ ID NO: 816360 - RNA, 20 nt, Artificial Sequence
  Synthetic
ucucacaaaggcugcacacu

SEQ ID NO: 816361 - RNA, 20 nt, Artificial Sequence
  Synthetic
uccauggccuugcucacacu

SEQ ID NO: 816362 - RNA, 20 nt, Artificial Sequence
  Synthetic
acccaagugucauucacacu

SEQ ID NO: 816363 - RNA, 20 nt, Artificial Sequence
  Synthetic
aguuguuaccucuucacacu

SEQ ID NO: 816364 - RNA, 20 nt, Artificial Sequence
  Synthetic
caaagucaauaaaagacacu

SEQ ID NO: 816365 - RNA, 20 nt, Artificial Sequence
  Synthetic
cugauaucaaccaagacacu

SEQ ID NO: 816366 - RNA, 20 nt, Artificial Sequence
  Synthetic
acucuaccacugcagacacu

SEQ ID NO: 816367 - RNA, 20 nt, Artificial Sequence
  Synthetic
agacaggaacaauagacacu

SEQ ID NO: 816368 - RNA, 20 nt, Artificial Sequence
  Synthetic
ugauuguuagagccgacacu

SEQ ID NO: 816369 - RNA, 20 nt, Artificial Sequence
  Synthetic
cuguucauuccugggacacu

SEQ ID NO: 816370 - RNA, 20 nt, Artificial Sequence
  Synthetic
uucauuggucgauggacacu

SEQ ID NO: 816371 - RNA, 20 nt, Artificial Sequence
  Synthetic
uuccuagugugaaugacacu

SEQ ID NO: 816372 - RNA, 20 nt, Artificial Sequence
  Synthetic
uuauuuaacuucaugacacu

SEQ ID NO: 816373 - RNA, 20 nt, Artificial Sequence
  Synthetic
ccaacaaggucccugacacu

SEQ ID NO: 816374 - RNA, 20 nt, Artificial Sequence
  Synthetic
cacaguggucugcugacacu

SEQ ID NO: 816375 - RNA, 20 nt, Artificial Sequence
  Synthetic
cacuccauuggggugacacu

SEQ ID NO: 816376 - RNA, 20 nt, Artificial Sequence
  Synthetic
agagggagagaauugacacu

SEQ ID NO: 816377 - RNA, 20 nt, Artificial Sequence
  Synthetic
cacugcaucuuauugacacu

SEQ ID NO: 816378 - RNA, 20 nt, Artificial Sequence
  Synthetic
cagggauagagaaauacacu

SEQ ID NO: 816379 - RNA, 20 nt, Artificial Sequence
  Synthetic
uccacauggcuagcuacacu

SEQ ID NO: 816380 - RNA, 20 nt, Artificial Sequence
  Synthetic
acaagucacaugcguacacu

SEQ ID NO: 816381 - RNA, 20 nt, Artificial Sequence
  Synthetic
caacuugguggugguacacu

SEQ ID NO: 816382 - RNA, 20 nt, Artificial Sequence
  Synthetic
aggcaaaauuuuuguacacu

SEQ ID NO: 816383 - RNA, 20 nt, Artificial Sequence
  Synthetic
ccuaacucaguuauuacacu

SEQ ID NO: 816384 - RNA, 20 nt, Artificial Sequence
  Synthetic
auguuuaugugaaaaccacu

SEQ ID NO: 816385 - RNA, 20 nt, Artificial Sequence
  Synthetic
cuuaacagauaacaaccacu

SEQ ID NO: 816386 - RNA, 20 nt, Artificial Sequence
  Synthetic
ugagauguucccuaaccacu

SEQ ID NO: 816387 - RNA, 20 nt, Artificial Sequence
  Synthetic
caaaguuaauguuaaccacu

SEQ ID NO: 816388 - RNA, 20 nt, Artificial Sequence
  Synthetic
aauaacuuuuugacaccacu

SEQ ID NO: 816389 - RNA, 20 nt, Artificial Sequence
  Synthetic
aagaaguaaaagucaccacu

SEQ ID NO: 816390 - RNA, 20 nt, Artificial Sequence
  Synthetic
auccacugagcuagaccacu

SEQ ID NO: 816391 - RNA, 20 nt, Artificial Sequence
  Synthetic
uaugcuacuaaaugaccacu

SEQ ID NO: 816392 - RNA, 20 nt, Artificial Sequence
  Synthetic
cacagagcagcaguaccacu

SEQ ID NO: 816393 - RNA, 20 nt, Artificial Sequence
  Synthetic
agaaaauguuugguaccacu

SEQ ID NO: 816394 - RNA, 20 nt, Artificial Sequence
  Synthetic
ucagaaaauccuuuaccacu

SEQ ID NO: 816395 - RNA, 20 nt, Artificial Sequence
  Synthetic
aucuucuuccugaacccacu

SEQ ID NO: 816396 - RNA, 20 nt, Artificial Sequence
  Synthetic
aaagucaaguugaacccacu

SEQ ID NO: 816397 - RNA, 20 nt, Artificial Sequence
  Synthetic
cccaacacagaguccccacu

SEQ ID NO: 816398 - RNA, 20 nt, Artificial Sequence
  Synthetic
cuccacacagaguccccacu

SEQ ID NO: 816399 - RNA, 20 nt, Artificial Sequence
  Synthetic
ccccacauagaguccccacu

SEQ ID NO: 816400 - RNA, 20 nt, Artificial Sequence
  Synthetic
aauaucucaagucgcccacu

SEQ ID NO: 816401 - RNA, 20 nt, Artificial Sequence
  Synthetic
uaguggaguuuaaucccacu

SEQ ID NO: 816402 - RNA, 20 nt, Artificial Sequence
  Synthetic
acuucuaguaauaucccacu

SEQ ID NO: 816403 - RNA, 20 nt, Artificial Sequence
  Synthetic
ugauuaaauuaccucccacu

SEQ ID NO: 816404 - RNA, 20 nt, Artificial Sequence
  Synthetic
auuauuaugcuucucccacu

SEQ ID NO: 816405 - RNA, 20 nt, Artificial Sequence
  Synthetic
cgccuguaaucccagccacu

SEQ ID NO: 816406 - RNA, 20 nt, Artificial Sequence
  Synthetic
ugccuguaaucccagccacu

SEQ ID NO: 816407 - RNA, 20 nt, Artificial Sequence
  Synthetic
ugccuguagucccagccacu

SEQ ID NO: 816408 - RNA, 20 nt, Artificial Sequence
  Synthetic
uccagagucuaaaggccacu

SEQ ID NO: 816409 - RNA, 20 nt, Artificial Sequence
  Synthetic
aggucuagaguuaggccacu

SEQ ID NO: 816410 - RNA, 20 nt, Artificial Sequence
  Synthetic
aguuauugcuuugggccacu

SEQ ID NO: 816411 - RNA, 20 nt, Artificial Sequence
  Synthetic
auauucucaugguggccacu

SEQ ID NO: 816412 - RNA, 20 nt, Artificial Sequence
  Synthetic
uuuacuuuccaaaugccacu

SEQ ID NO: 816413 - RNA, 20 nt, Artificial Sequence
  Synthetic
aauuuucuguuaaugccacu

SEQ ID NO: 816414 - RNA, 20 nt, Artificial Sequence
  Synthetic
aauuuuugacaauugccacu

SEQ ID NO: 816415 - RNA, 20 nt, Artificial Sequence
  Synthetic
ucucaaaauucacauccacu

SEQ ID NO: 816416 - RNA, 20 nt, Artificial Sequence
  Synthetic
ugcaguuucagacauccacu

SEQ ID NO: 816417 - RNA, 20 nt, Artificial Sequence
  Synthetic
ccucuucucacagcuccacu

SEQ ID NO: 816418 - RNA, 20 nt, Artificial Sequence
  Synthetic
aucaacauuaguucuccacu

SEQ ID NO: 816419 - RNA, 20 nt, Artificial Sequence
  Synthetic
uuuuuuuuuuuuucuccacu

SEQ ID NO: 816420 - RNA, 20 nt, Artificial Sequence
  Synthetic
agaugucuauuaaguccacu

SEQ ID NO: 816421 - RNA, 20 nt, Artificial Sequence
  Synthetic
ucauuauugagaguuccacu

SEQ ID NO: 816422 - RNA, 20 nt, Artificial Sequence
  Synthetic
uuaacuaauuuaguuccacu

SEQ ID NO: 816423 - RNA, 20 nt, Artificial Sequence
  Synthetic
aauggacuuacgguuccacu

SEQ ID NO: 816424 - RNA, 20 nt, Artificial Sequence
  Synthetic
cucauuguuguuguuccacu

SEQ ID NO: 816425 - RNA, 20 nt, Artificial Sequence
  Synthetic
uucuuuccagcauuuccacu

SEQ ID NO: 816426 - RNA, 20 nt, Artificial Sequence
  Synthetic
uggauuacagccuuuccacu

SEQ ID NO: 816427 - RNA, 20 nt, Artificial Sequence
  Synthetic
uaaaucgauuauuuuccacu

SEQ ID NO: 816428 - RNA, 20 nt, Artificial Sequence
  Synthetic
aauuuuacuuauuuuccacu

SEQ ID NO: 816429 - RNA, 20 nt, Artificial Sequence
  Synthetic
ccucagccucccaaagcacu

SEQ ID NO: 816430 - RNA, 20 nt, Artificial Sequence
  Synthetic
ccuuggccucccaaagcacu

SEQ ID NO: 816431 - RNA, 20 nt, Artificial Sequence
  Synthetic
cagaagcccagccaagcacu

SEQ ID NO: 816432 - RNA, 20 nt, Artificial Sequence
  Synthetic
aauuaagguaacgaagcacu

SEQ ID NO: 816433 - RNA, 20 nt, Artificial Sequence
  Synthetic
uuucuaugguuugaagcacu

SEQ ID NO: 816434 - RNA, 20 nt, Artificial Sequence
  Synthetic
acgccuguaaucccagcacu

SEQ ID NO: 816435 - RNA, 20 nt, Artificial Sequence
  Synthetic
accucucugcugucagcacu

SEQ ID NO: 816436 - RNA, 20 nt, Artificial Sequence
  Synthetic
agccaguaagugucagcacu

SEQ ID NO: 816437 - RNA, 20 nt, Artificial Sequence
  Synthetic
aauaaauauuuuucagcacu

SEQ ID NO: 816438 - RNA, 20 nt, Artificial Sequence
  Synthetic
agaggaaaauaaagagcacu

SEQ ID NO: 816439 - RNA, 20 nt, Artificial Sequence
  Synthetic
uucucaucaugucuagcacu

SEQ ID NO: 816440 - RNA, 20 nt, Artificial Sequence
  Synthetic
cucuguccgcagguagcacu

SEQ ID NO: 816441 - RNA, 20 nt, Artificial Sequence
  Synthetic
acacuuuccguauuagcacu

SEQ ID NO: 816442 - RNA, 20 nt, Artificial Sequence
  Synthetic
cugagugaauccuuagcacu

SEQ ID NO: 816443 - RNA, 20 nt, Artificial Sequence
  Synthetic
cugaguucuuacuacgcacu

SEQ ID NO: 816444 - RNA, 20 nt, Artificial Sequence
  Synthetic
aaguugaggacaggcgcacu

SEQ ID NO: 816445 - RNA, 20 nt, Artificial Sequence
  Synthetic
aaaauggaagcacaggcacu

SEQ ID NO: 816446 - RNA, 20 nt, Artificial Sequence
  Synthetic
ugggcaccauucuaggcacu

SEQ ID NO: 816447 - RNA, 20 nt, Artificial Sequence
  Synthetic
uucugcacuugaagggcacu

SEQ ID NO: 816448 - RNA, 20 nt, Artificial Sequence
  Synthetic
aauuauaguagaugggcacu

SEQ ID NO: 816449 - RNA, 20 nt, Artificial Sequence
  Synthetic
uuuguacagauaugggcacu

SEQ ID NO: 816450 - RNA, 20 nt, Artificial Sequence
  Synthetic
uauuuuaucccauuggcacu

SEQ ID NO: 816451 - RNA, 20 nt, Artificial Sequence
  Synthetic
aacauaacauuuaaugcacu

SEQ ID NO: 816452 - RNA, 20 nt, Artificial Sequence
  Synthetic
uuuaaccuugcuuaugcacu

SEQ ID NO: 816453 - RNA, 20 nt, Artificial Sequence
  Synthetic
cuucccuugucuucugcacu

SEQ ID NO: 816454 - RNA, 20 nt, Artificial Sequence
  Synthetic
ugccuuuuagguagugcacu

SEQ ID NO: 816455 - RNA, 20 nt, Artificial Sequence
  Synthetic
aaucacuggacaugugcacu

SEQ ID NO: 816456 - RNA, 20 nt, Artificial Sequence
  Synthetic
auugguccuaaaauugcacu

SEQ ID NO: 816457 - RNA, 20 nt, Artificial Sequence
  Synthetic
uugguguaggucauugcacu

SEQ ID NO: 816458 - RNA, 20 nt, Artificial Sequence
  Synthetic
agacgaugguagcuugcacu

SEQ ID NO: 816459 - RNA, 20 nt, Artificial Sequence
  Synthetic
uugaaaugaagcuuugcacu

SEQ ID NO: 816460 - RNA, 20 nt, Artificial Sequence
  Synthetic
auuuaauucuuuuuugcacu

SEQ ID NO: 816461 - RNA, 20 nt, Artificial Sequence
  Synthetic
aucuccuuuaagaaaucacu

SEQ ID NO: 816462 - RNA, 20 nt, Artificial Sequence
  Synthetic
uggucauuuguucaaucacu

SEQ ID NO: 816463 - RNA, 20 nt, Artificial Sequence
  Synthetic
ugacaugaauaagaaucacu

SEQ ID NO: 816464 - RNA, 20 nt, Artificial Sequence
  Synthetic
uaaugugcccaugaaucacu

SEQ ID NO: 816465 - RNA, 20 nt, Artificial Sequence
  Synthetic
augugucacuuugaaucacu

SEQ ID NO: 816466 - RNA, 20 nt, Artificial Sequence
  Synthetic
acauauauaaaaacaucacu

SEQ ID NO: 816467 - RNA, 20 nt, Artificial Sequence
  Synthetic
uccacuaccaagacaucacu

SEQ ID NO: 816468 - RNA, 20 nt, Artificial Sequence
  Synthetic
cauugcacugugacaucacu

SEQ ID NO: 816469 - RNA, 20 nt, Artificial Sequence
  Synthetic
ucagcagcguuagcaucacu

SEQ ID NO: 816470 - RNA, 20 nt, Artificial Sequence
  Synthetic
cuagcaguaucggcaucacu

SEQ ID NO: 816471 - RNA, 20 nt, Artificial Sequence
  Synthetic
ccaacaccuuccucaucacu

SEQ ID NO: 816472 - RNA, 20 nt, Artificial Sequence
  Synthetic
uuauuagaguauucaucacu

SEQ ID NO: 816473 - RNA, 20 nt, Artificial Sequence
  Synthetic
ugcccaguaaugggaucacu

SEQ ID NO: 816474 - RNA, 20 nt, Artificial Sequence
  Synthetic
uuuuuauuaaucauaucacu

SEQ ID NO: 816475 - RNA, 20 nt, Artificial Sequence
  Synthetic
acuuaaaucuaguuaucacu

SEQ ID NO: 816476 - RNA, 20 nt, Artificial Sequence
  Synthetic
uguguuucauuggacucacu

SEQ ID NO: 816477 - RNA, 20 nt, Artificial Sequence
  Synthetic
aucuuuguuuuauacucacu

SEQ ID NO: 816478 - RNA, 20 nt, Artificial Sequence
  Synthetic
aaagucuucaauaccucacu

SEQ ID NO: 816479 - RNA, 20 nt, Artificial Sequence
  Synthetic
uccuccuucccuaccucacu

SEQ ID NO: 816480 - RNA, 20 nt, Artificial Sequence
  Synthetic
ugacuacccaaccccucacu

SEQ ID NO: 816481 - RNA, 20 nt, Artificial Sequence
  Synthetic
cagcuuucucuccccucacu

SEQ ID NO: 816482 - RNA, 20 nt, Artificial Sequence
  Synthetic
accuuuguccaguccucacu

SEQ ID NO: 816483 - RNA, 20 nt, Artificial Sequence
  Synthetic
uauuugauagcuuccucacu

SEQ ID NO: 816484 - RNA, 20 nt, Artificial Sequence
  Synthetic
uuucuggcuguuuccucacu

SEQ ID NO: 816485 - RNA, 20 nt, Artificial Sequence
  Synthetic
uuuuccuucaaaaucucacu

SEQ ID NO: 816486 - RNA, 20 nt, Artificial Sequence
  Synthetic
aguacccggcucaucucacu

SEQ ID NO: 816487 - RNA, 20 nt, Artificial Sequence
  Synthetic
ccuucuguguugaucucacu

SEQ ID NO: 816488 - RNA, 20 nt, Artificial Sequence
  Synthetic
ugauucaauuaccucucacu

SEQ ID NO: 816489 - RNA, 20 nt, Artificial Sequence
  Synthetic
ccagguauucccuucucacu

SEQ ID NO: 816490 - RNA, 20 nt, Artificial Sequence
  Synthetic
auacagcacucaaagucacu

SEQ ID NO: 816491 - RNA, 20 nt, Artificial Sequence
  Synthetic
ucuguuuuagucaagucacu

SEQ ID NO: 816492 - RNA, 20 nt, Artificial Sequence
  Synthetic
auauaaauuugagagucacu

SEQ ID NO: 816493 - RNA, 20 nt, Artificial Sequence
  Synthetic
uucuacuuagcuuagucacu

SEQ ID NO: 816494 - RNA, 20 nt, Artificial Sequence
  Synthetic
ugucccccaacauggucacu

SEQ ID NO: 816495 - RNA, 20 nt, Artificial Sequence
  Synthetic
agagagcccagaaugucacu

SEQ ID NO: 816496 - RNA, 20 nt, Artificial Sequence
  Synthetic
auaagcauuuguaugucacu

SEQ ID NO: 816497 - RNA, 20 nt, Artificial Sequence
  Synthetic
uucccuguaaucgugucacu

SEQ ID NO: 816498 - RNA, 20 nt, Artificial Sequence
  Synthetic
uccaguuagucugugucacu

SEQ ID NO: 816499 - RNA, 20 nt, Artificial Sequence
  Synthetic
caggaaauucacuugucacu

SEQ ID NO: 816500 - RNA, 20 nt, Artificial Sequence
  Synthetic
uaaugaaauuguuugucacu

SEQ ID NO: 816501 - RNA, 20 nt, Artificial Sequence
  Synthetic
uggaacacaguuaauucacu

SEQ ID NO: 816502 - RNA, 20 nt, Artificial Sequence
  Synthetic
agauuaaguguuaauucacu

SEQ ID NO: 816503 - RNA, 20 nt, Artificial Sequence
  Synthetic
auuuuaaccugccauucacu

SEQ ID NO: 816504 - RNA, 20 nt, Artificial Sequence
  Synthetic
uuugaagccucucauucacu

SEQ ID NO: 816505 - RNA, 20 nt, Artificial Sequence
  Synthetic
acuggauagugucauucacu

SEQ ID NO: 816506 - RNA, 20 nt, Artificial Sequence
  Synthetic
caguuuuggaccuauucacu

SEQ ID NO: 816507 - RNA, 20 nt, Artificial Sequence
  Synthetic
caucugcccuguuauucacu

SEQ ID NO: 816508 - RNA, 20 nt, Artificial Sequence
  Synthetic
uccuucuucauuuauucacu

SEQ ID NO: 816509 - RNA, 20 nt, Artificial Sequence
  Synthetic
agucauuauuuuuauucacu

SEQ ID NO: 816510 - RNA, 20 nt, Artificial Sequence
  Synthetic
ugagcugguuccacuucacu

SEQ ID NO: 816511 - RNA, 20 nt, Artificial Sequence
  Synthetic
cauuugagaaagacuucacu

SEQ ID NO: 816512 - RNA, 20 nt, Artificial Sequence
  Synthetic
uaaaauuguuugacuucacu

SEQ ID NO: 816513 - RNA, 20 nt, Artificial Sequence
  Synthetic
accaucuguugcccuucacu

SEQ ID NO: 816514 - RNA, 20 nt, Artificial Sequence
  Synthetic
ucuugguuucuuucuucacu

SEQ ID NO: 816515 - RNA, 20 nt, Artificial Sequence
  Synthetic
ucuaaauauagaaguucacu

SEQ ID NO: 816516 - RNA, 20 nt, Artificial Sequence
  Synthetic
auuaauucuuucaguucacu

SEQ ID NO: 816517 - RNA, 20 nt, Artificial Sequence
  Synthetic
cauuacaagaagaguucacu

SEQ ID NO: 816518 - RNA, 20 nt, Artificial Sequence
  Synthetic
cucuuuuuauggaguucacu

SEQ ID NO: 816519 - RNA, 20 nt, Artificial Sequence
  Synthetic
aguagugauuaauguucacu

SEQ ID NO: 816520 - RNA, 20 nt, Artificial Sequence
  Synthetic
uuaagcccuguucuuucacu

SEQ ID NO: 816521 - RNA, 20 nt, Artificial Sequence
  Synthetic
aagaagagaguaguuucacu

SEQ ID NO: 816522 - RNA, 20 nt, Artificial Sequence
  Synthetic
ucuagagguaauguuucacu

SEQ ID NO: 816523 - RNA, 20 nt, Artificial Sequence
  Synthetic
agugcuuacuauguuucacu

SEQ ID NO: 816524 - RNA, 20 nt, Artificial Sequence
  Synthetic
ucucuuuccuuuguuucacu

SEQ ID NO: 816525 - RNA, 20 nt, Artificial Sequence
  Synthetic
cugcguuuucauuuuucacu

SEQ ID NO: 816526 - RNA, 20 nt, Artificial Sequence
  Synthetic
uggaucauuuauuuuucacu

SEQ ID NO: 816527 - RNA, 20 nt, Artificial Sequence
  Synthetic
aaauuuuucacaaaaagacu

SEQ ID NO: 816528 - RNA, 20 nt, Artificial Sequence
  Synthetic
auuacuuugagaaaaagacu

SEQ ID NO: 816529 - RNA, 20 nt, Artificial Sequence
  Synthetic
ucacagaauuguaaaagacu

SEQ ID NO: 816530 - RNA, 20 nt, Artificial Sequence
  Synthetic
uauucacaauaacaaagacu

SEQ ID NO: 816531 - RNA, 20 nt, Artificial Sequence
  Synthetic
uauuggaacucacaaagacu

SEQ ID NO: 816532 - RNA, 20 nt, Artificial Sequence
  Synthetic
uauucacaauagcaaagacu

SEQ ID NO: 816533 - RNA, 20 nt, Artificial Sequence
  Synthetic
uguucacaauagcaaagacu

SEQ ID NO: 816534 - RNA, 20 nt, Artificial Sequence
  Synthetic
uauuuacaauagcaaagacu

SEQ ID NO: 816535 - RNA, 20 nt, Artificial Sequence
  Synthetic
uguuuacaauagcaaagacu

SEQ ID NO: 816536 - RNA, 20 nt, Artificial Sequence
  Synthetic
uauuuacaguagcaaagacu

SEQ ID NO: 816537 - RNA, 20 nt, Artificial Sequence
  Synthetic
aaauccuuaguggaaagacu

SEQ ID NO: 816538 - RNA, 20 nt, Artificial Sequence
  Synthetic
ugaucuuuugaugaaagacu

SEQ ID NO: 816539 - RNA, 20 nt, Artificial Sequence
  Synthetic
uuuuagaaaggguaaagacu

SEQ ID NO: 816540 - RNA, 20 nt, Artificial Sequence
  Synthetic
aaagguagcugguaaagacu

SEQ ID NO: 816541 - RNA, 20 nt, Artificial Sequence
  Synthetic
augaagaaauacccaagacu

SEQ ID NO: 816542 - RNA, 20 nt, Artificial Sequence
  Synthetic
ugaucacaaggggcaagacu

SEQ ID NO: 816543 - RNA, 20 nt, Artificial Sequence
  Synthetic
cuuuucuagaaugcaagacu

SEQ ID NO: 816544 - RNA, 20 nt, Artificial Sequence
  Synthetic
ucuagcaaaaacagaagacu

SEQ ID NO: 816545 - RNA, 20 nt, Artificial Sequence
  Synthetic
uuguuucguaaaggaagacu

SEQ ID NO: 816546 - RNA, 20 nt, Artificial Sequence
  Synthetic
ugacaucugaugggaagacu

SEQ ID NO: 816547 - RNA, 20 nt, Artificial Sequence
  Synthetic
ugaaagacuuugggaagacu

SEQ ID NO: 816548 - RNA, 20 nt, Artificial Sequence
  Synthetic
ugugguuacucaugaagacu

SEQ ID NO: 816549 - RNA, 20 nt, Artificial Sequence
  Synthetic
ucccaguaucuaugaagacu

SEQ ID NO: 816550 - RNA, 20 nt, Artificial Sequence
  Synthetic
auucauauaacuugaagacu

SEQ ID NO: 816551 - RNA, 20 nt, Artificial Sequence
  Synthetic
aacaaaugaaagcuaagacu

SEQ ID NO: 816552 - RNA, 20 nt, Artificial Sequence
  Synthetic
ccaauuagacuuguaagacu

SEQ ID NO: 816553 - RNA, 20 nt, Artificial Sequence
  Synthetic
ugcccaggcaugaacagacu

SEQ ID NO: 816554 - RNA, 20 nt, Artificial Sequence
  Synthetic
cauuccggggggcacagacu

SEQ ID NO: 816555 - RNA, 20 nt, Artificial Sequence
  Synthetic
caguagauaggagacagacu

SEQ ID NO: 816556 - RNA, 20 nt, Artificial Sequence
  Synthetic
aauucugugacuuacagacu

SEQ ID NO: 816557 - RNA, 20 nt, Artificial Sequence
  Synthetic
caggaguuugugaccagacu

SEQ ID NO: 816558 - RNA, 20 nt, Artificial Sequence
  Synthetic
uuuuucaaauuuuccagacu

SEQ ID NO: 816559 - RNA, 20 nt, Artificial Sequence
  Synthetic
auuuguaaauuuuccagacu

SEQ ID NO: 816560 - RNA, 20 nt, Artificial Sequence
  Synthetic
uauucagaaauaagcagacu

SEQ ID NO: 816561 - RNA, 20 nt, Artificial Sequence
  Synthetic
caucuucauauuagcagacu

SEQ ID NO: 816562 - RNA, 20 nt, Artificial Sequence
  Synthetic
accacucuggacaucagacu

SEQ ID NO: 816563 - RNA, 20 nt, Artificial Sequence
  Synthetic
agguuuucccaagucagacu

SEQ ID NO: 816564 - RNA, 20 nt, Artificial Sequence
  Synthetic
uuccaaagugcugucagacu

SEQ ID NO: 816565 - RNA, 20 nt, Artificial Sequence
  Synthetic
caucagaggugguucagacu

SEQ ID NO: 816566 - RNA, 20 nt, Artificial Sequence
  Synthetic
aaaugagucauuuucagacu

SEQ ID NO: 816567 - RNA, 20 nt, Artificial Sequence
  Synthetic
uuguggacuaugaagagacu

SEQ ID NO: 816568 - RNA, 20 nt, Artificial Sequence
  Synthetic
auaaaggaaugccagagacu

SEQ ID NO: 816569 - RNA, 20 nt, Artificial Sequence
  Synthetic
agucuguuuuaucagagacu

SEQ ID NO: 816570 - RNA, 20 nt, Artificial Sequence
  Synthetic
uucuauuuuuacuagagacu

SEQ ID NO: 816571 - RNA, 20 nt, Artificial Sequence
  Synthetic
uuguauuuuuaguagagacu

SEQ ID NO: 816572 - RNA, 20 nt, Artificial Sequence
  Synthetic
agagacagaaaaccgagacu

SEQ ID NO: 816573 - RNA, 20 nt, Artificial Sequence
  Synthetic
augaagaaauacccgagacu

SEQ ID NO: 816574 - RNA, 20 nt, Artificial Sequence
  Synthetic
auaaagacauacccgagacu

SEQ ID NO: 816575 - RNA, 20 nt, Artificial Sequence
  Synthetic
auaaagaacugcccgagacu

SEQ ID NO: 816576 - RNA, 20 nt, Artificial Sequence
  Synthetic
augaagaaauagccgagacu

SEQ ID NO: 816577 - RNA, 20 nt, Artificial Sequence
  Synthetic
auguaaagaccaucgagacu

SEQ ID NO: 816578 - RNA, 20 nt, Artificial Sequence
  Synthetic
ccccauuucaacaggagacu

SEQ ID NO: 816579 - RNA, 20 nt, Artificial Sequence
  Synthetic
uuuaauauuuccaggagacu

SEQ ID NO: 816580 - RNA, 20 nt, Artificial Sequence
  Synthetic
aacuaauggcaagggagacu

SEQ ID NO: 816581 - RNA, 20 nt, Artificial Sequence
  Synthetic
uacuccauaagugggagacu

SEQ ID NO: 816582 - RNA, 20 nt, Artificial Sequence
  Synthetic
uacugugcuuaauggagacu

SEQ ID NO: 816583 - RNA, 20 nt, Artificial Sequence
  Synthetic
cuagcauguucuuggagacu

SEQ ID NO: 816584 - RNA, 20 nt, Artificial Sequence
  Synthetic
uacaaugggcuuuggagacu

SEQ ID NO: 816585 - RNA, 20 nt, Artificial Sequence
  Synthetic
ugcuaguaagaaaugagacu

SEQ ID NO: 816586 - RNA, 20 nt, Artificial Sequence
  Synthetic
auaaagacauacaugagacu

SEQ ID NO: 816587 - RNA, 20 nt, Artificial Sequence
  Synthetic
aaagaaagaggcaugagacu

SEQ ID NO: 816588 - RNA, 20 nt, Artificial Sequence
  Synthetic
cagaugagagcacugagacu

SEQ ID NO: 816589 - RNA, 20 nt, Artificial Sequence
  Synthetic
auaaagaaauaccugagacu

SEQ ID NO: 816590 - RNA, 20 nt, Artificial Sequence
  Synthetic
auaaagacauaccugagacu

SEQ ID NO: 816591 - RNA, 20 nt, Artificial Sequence
  Synthetic
auaaagaacuaccugagacu

SEQ ID NO: 816592 - RNA, 20 nt, Artificial Sequence
  Synthetic
uaaagaacuucccugagacu

SEQ ID NO: 816593 - RNA, 20 nt, Artificial Sequence
  Synthetic
auaacaaaaugccugagacu

SEQ ID NO: 816594 - RNA, 20 nt, Artificial Sequence
  Synthetic
auaaagaacugccugagacu

SEQ ID NO: 816595 - RNA, 20 nt, Artificial Sequence
  Synthetic
acaaagacauaucugagacu

SEQ ID NO: 816596 - RNA, 20 nt, Artificial Sequence
  Synthetic
agucuguuuugucugagacu

SEQ ID NO: 816597 - RNA, 20 nt, Artificial Sequence
  Synthetic
ugauuuuguauucugagacu

SEQ ID NO: 816598 - RNA, 20 nt, Artificial Sequence
  Synthetic
agacacauuugggugagacu

SEQ ID NO: 816599 - RNA, 20 nt, Artificial Sequence
  Synthetic
auaaagacauacuugagacu

SEQ ID NO: 816600 - RNA, 20 nt, Artificial Sequence
  Synthetic
uuuuuuuuuuuuuugagacu

SEQ ID NO: 816601 - RNA, 20 nt, Artificial Sequence
  Synthetic
agaugagaucacaauagacu

SEQ ID NO: 816602 - RNA, 20 nt, Artificial Sequence
  Synthetic
auaaaauaaugccauagacu

SEQ ID NO: 816603 - RNA, 20 nt, Artificial Sequence
  Synthetic
aaaaaguaaucucauagacu

SEQ ID NO: 816604 - RNA, 20 nt, Artificial Sequence
  Synthetic
aguugaucucaagauagacu

SEQ ID NO: 816605 - RNA, 20 nt, Artificial Sequence
  Synthetic
uuccaaggcuaggauagacu

SEQ ID NO: 816606 - RNA, 20 nt, Artificial Sequence
  Synthetic
agcuaugucaaugguagacu

SEQ ID NO: 816607 - RNA, 20 nt, Artificial Sequence
  Synthetic
agucauaauaaaauuagacu

SEQ ID NO: 816608 - RNA, 20 nt, Artificial Sequence
  Synthetic
agaaaaccccggauuagacu

SEQ ID NO: 816609 - RNA, 20 nt, Artificial Sequence
  Synthetic
aaacccaucuaacuuagacu

SEQ ID NO: 816610 - RNA, 20 nt, Artificial Sequence
  Synthetic
auagcuaaauaccuuagacu

SEQ ID NO: 816611 - RNA, 20 nt, Artificial Sequence
  Synthetic
aaaguagcagguuuuagacu

SEQ ID NO: 816612 - RNA, 20 nt, Artificial Sequence
  Synthetic
uuuauuauuauuuuuagacu

SEQ ID NO: 816613 - RNA, 20 nt, Artificial Sequence
  Synthetic
auuuauuuugaaagacgacu

SEQ ID NO: 816614 - RNA, 20 nt, Artificial Sequence
  Synthetic
uaauuugugcagaggcgacu

SEQ ID NO: 816615 - RNA, 20 nt, Artificial Sequence
  Synthetic
uaaugaaaguugaaaggacu

SEQ ID NO: 816616 - RNA, 20 nt, Artificial Sequence
  Synthetic
cagugcuuuauuaaaggacu

SEQ ID NO: 816617 - RNA, 20 nt, Artificial Sequence
  Synthetic
aauaaacuuucucaaggacu

SEQ ID NO: 816618 - RNA, 20 nt, Artificial Sequence
  Synthetic
cccugucaccuucaaggacu

SEQ ID NO: 816619 - RNA, 20 nt, Artificial Sequence
  Synthetic
auuguuuaaauagaaggacu

SEQ ID NO: 816620 - RNA, 20 nt, Artificial Sequence
  Synthetic
uuucaugaaguuacaggacu

SEQ ID NO: 816621 - RNA, 20 nt, Artificial Sequence
  Synthetic
cugugugcggcaucaggacu

SEQ ID NO: 816622 - RNA, 20 nt, Artificial Sequence
  Synthetic
acagggccuggaugaggacu

SEQ ID NO: 816623 - RNA, 20 nt, Artificial Sequence
  Synthetic
cacauaaccuuucuaggacu

SEQ ID NO: 816624 - RNA, 20 nt, Artificial Sequence
  Synthetic
caguucaggacuguaggacu

SEQ ID NO: 816625 - RNA, 20 nt, Artificial Sequence
  Synthetic
accaacuaaacucacggacu

SEQ ID NO: 816626 - RNA, 20 nt, Artificial Sequence
  Synthetic
cguauuccaguucagggacu

SEQ ID NO: 816627 - RNA, 20 nt, Artificial Sequence
  Synthetic
cuaugugcagccuagggacu

SEQ ID NO: 816628 - RNA, 20 nt, Artificial Sequence
  Synthetic
caaugggcaaaaacgggacu

SEQ ID NO: 816629 - RNA, 20 nt, Artificial Sequence
  Synthetic
uucugggucgaguggggacu

SEQ ID NO: 816630 - RNA, 20 nt, Artificial Sequence
  Synthetic
ccaagcugggaguggggacu

SEQ ID NO: 816631 - RNA, 20 nt, Artificial Sequence
  Synthetic
agggaguacacugugggacu

SEQ ID NO: 816632 - RNA, 20 nt, Artificial Sequence
  Synthetic
uauugguguucugugggacu

SEQ ID NO: 816633 - RNA, 20 nt, Artificial Sequence
  Synthetic
aguuagaagaaaaauggacu

SEQ ID NO: 816634 - RNA, 20 nt, Artificial Sequence
  Synthetic
cacauuuggauacauggacu

SEQ ID NO: 816635 - RNA, 20 nt, Artificial Sequence
  Synthetic
ccagaacaaguaacuggacu

SEQ ID NO: 816636 - RNA, 20 nt, Artificial Sequence
  Synthetic
uucucuaagaauucuggacu

SEQ ID NO: 816637 - RNA, 20 nt, Artificial Sequence
  Synthetic
agaugcugguggcuuggacu

SEQ ID NO: 816638 - RNA, 20 nt, Artificial Sequence
  Synthetic
uuaagccaugauguuggacu

SEQ ID NO: 816639 - RNA, 20 nt, Artificial Sequence
  Synthetic
auaaugccaaguguuggacu

SEQ ID NO: 816640 - RNA, 20 nt, Artificial Sequence
  Synthetic
cuuagaugaaacuuuggacu

SEQ ID NO: 816641 - RNA, 20 nt, Artificial Sequence
  Synthetic
cucagaugagacuuuggacu

SEQ ID NO: 816642 - RNA, 20 nt, Artificial Sequence
  Synthetic
uucaacuuuaauuuuggacu

SEQ ID NO: 816643 - RNA, 20 nt, Artificial Sequence
  Synthetic
agauauguagagaaaugacu

SEQ ID NO: 816644 - RNA, 20 nt, Artificial Sequence
  Synthetic
uacaaaggagaagaaugacu

SEQ ID NO: 816645 - RNA, 20 nt, Artificial Sequence
  Synthetic
ccacucccuuucuaaugacu

SEQ ID NO: 816646 - RNA, 20 nt, Artificial Sequence
  Synthetic
ucaugacaaagaacaugacu

SEQ ID NO: 816647 - RNA, 20 nt, Artificial Sequence
  Synthetic
acuuauaguuccacaugacu

SEQ ID NO: 816648 - RNA, 20 nt, Artificial Sequence
  Synthetic
acucacagucucacaugacu

SEQ ID NO: 816649 - RNA, 20 nt, Artificial Sequence
  Synthetic
cuauaaaucucuacaugacu

SEQ ID NO: 816650 - RNA, 20 nt, Artificial Sequence
  Synthetic
uucucagaacuuauaugacu

SEQ ID NO: 816651 - RNA, 20 nt, Artificial Sequence
  Synthetic
cuucaacagcuuauaugacu

SEQ ID NO: 816652 - RNA, 20 nt, Artificial Sequence
  Synthetic
aagaaagagaucuuaugacu

SEQ ID NO: 816653 - RNA, 20 nt, Artificial Sequence
  Synthetic
uguuuggaauuagacugacu

SEQ ID NO: 816654 - RNA, 20 nt, Artificial Sequence
  Synthetic
cagugagccaauuacugacu

SEQ ID NO: 816655 - RNA, 20 nt, Artificial Sequence
  Synthetic
uuaucuauaagccccugacu

SEQ ID NO: 816656 - RNA, 20 nt, Artificial Sequence
  Synthetic
uuucucccaccauccugacu

SEQ ID NO: 816657 - RNA, 20 nt, Artificial Sequence
  Synthetic
uauaaaguuccuuccugacu

SEQ ID NO: 816658 - RNA, 20 nt, Artificial Sequence
  Synthetic
accugaaagcagagcugacu

SEQ ID NO: 816659 - RNA, 20 nt, Artificial Sequence
  Synthetic
caccuuccagggggcugacu

SEQ ID NO: 816660 - RNA, 20 nt, Artificial Sequence
  Synthetic
uacuucugccuuaucugacu

SEQ ID NO: 816661 - RNA, 20 nt, Artificial Sequence
  Synthetic
cccaaguaaggagucugacu

SEQ ID NO: 816662 - RNA, 20 nt, Artificial Sequence
  Synthetic
cugggauaccuagucugacu

SEQ ID NO: 816663 - RNA, 20 nt, Artificial Sequence
  Synthetic
aaagcaagugacuucugacu

SEQ ID NO: 816664 - RNA, 20 nt, Artificial Sequence
  Synthetic
cugaaaauguggaagugacu

SEQ ID NO: 816665 - RNA, 20 nt, Artificial Sequence
  Synthetic
caacacccaaaacagugacu

SEQ ID NO: 816666 - RNA, 20 nt, Artificial Sequence
  Synthetic
auauuaugaucauagugacu

SEQ ID NO: 816667 - RNA, 20 nt, Artificial Sequence
  Synthetic
uucagauaagauuagugacu

SEQ ID NO: 816668 - RNA, 20 nt, Artificial Sequence
  Synthetic
uuuuaaugcauuuagugacu

SEQ ID NO: 816669 - RNA, 20 nt, Artificial Sequence
  Synthetic
auaucauaguuugggugacu

SEQ ID NO: 816670 - RNA, 20 nt, Artificial Sequence
  Synthetic
uaauuuccucaacugugacu

SEQ ID NO: 816671 - RNA, 20 nt, Artificial Sequence
  Synthetic
cugaagcuagcucugugacu

SEQ ID NO: 816672 - RNA, 20 nt, Artificial Sequence
  Synthetic
ucucuaauuaaaaauugacu

SEQ ID NO: 816673 - RNA, 20 nt, Artificial Sequence
  Synthetic
uaugucucuuugaauugacu

SEQ ID NO: 816674 - RNA, 20 nt, Artificial Sequence
  Synthetic
agacucugauauaauugacu

SEQ ID NO: 816675 - RNA, 20 nt, Artificial Sequence
  Synthetic
cuugggaaaauacauugacu

SEQ ID NO: 816676 - RNA, 20 nt, Artificial Sequence
  Synthetic
cuuuuggcucaggauugacu

SEQ ID NO: 816677 - RNA, 20 nt, Artificial Sequence
  Synthetic
cuuuuggcuuaggauugacu

SEQ ID NO: 816678 - RNA, 20 nt, Artificial Sequence
  Synthetic
cuuuuugcuuaggauugacu

SEQ ID NO: 816679 - RNA, 20 nt, Artificial Sequence
  Synthetic
aauuccaggucugauugacu

SEQ ID NO: 816680 - RNA, 20 nt, Artificial Sequence
  Synthetic
auuccagaaacauauugacu

SEQ ID NO: 816681 - RNA, 20 nt, Artificial Sequence
  Synthetic
aagugguggugcuauugacu

SEQ ID NO: 816682 - RNA, 20 nt, Artificial Sequence
  Synthetic
uuuugugcaucaacuugacu

SEQ ID NO: 816683 - RNA, 20 nt, Artificial Sequence
  Synthetic
agucauaugauggcuugacu

SEQ ID NO: 816684 - RNA, 20 nt, Artificial Sequence
  Synthetic
uuguaugcacaugcuugacu

SEQ ID NO: 816685 - RNA, 20 nt, Artificial Sequence
  Synthetic
uguaagaaagcugcuugacu

SEQ ID NO: 816686 - RNA, 20 nt, Artificial Sequence
  Synthetic
aaagauaacuucucuugacu

SEQ ID NO: 816687 - RNA, 20 nt, Artificial Sequence
  Synthetic
augaaaauuaaaaguugacu

SEQ ID NO: 816688 - RNA, 20 nt, Artificial Sequence
  Synthetic
uucacauuuucagguugacu

SEQ ID NO: 816689 - RNA, 20 nt, Artificial Sequence
  Synthetic
uugugccucucuuguugacu

SEQ ID NO: 816690 - RNA, 20 nt, Artificial Sequence
  Synthetic
aaaguguucaagauuugacu

SEQ ID NO: 816691 - RNA, 20 nt, Artificial Sequence
  Synthetic
auacagugauagauuugacu

SEQ ID NO: 816692 - RNA, 20 nt, Artificial Sequence
  Synthetic
caauuauguuuccuuugacu

SEQ ID NO: 816693 - RNA, 20 nt, Artificial Sequence
  Synthetic
auuucauccucuaaaauacu

SEQ ID NO: 816694 - RNA, 20 nt, Artificial Sequence
  Synthetic
uuuaaugcuuuuaaaauacu

SEQ ID NO: 816695 - RNA, 20 nt, Artificial Sequence
  Synthetic
aauuaaacggaacaaauacu

SEQ ID NO: 816696 - RNA, 20 nt, Artificial Sequence
  Synthetic
aacuguacgugacaaauacu

SEQ ID NO: 816697 - RNA, 20 nt, Artificial Sequence
  Synthetic
cuguugcacuaucaaauacu

SEQ ID NO: 816698 - RNA, 20 nt, Artificial Sequence
  Synthetic
uauuaaaggacucaaauacu

SEQ ID NO: 816699 - RNA, 20 nt, Artificial Sequence
  Synthetic
aaauagacaauucaaauacu

SEQ ID NO: 816700 - RNA, 20 nt, Artificial Sequence
  Synthetic
auuacacuuaaaacaauacu

SEQ ID NO: 816701 - RNA, 20 nt, Artificial Sequence
  Synthetic
uuaaaaaaaaugccaauacu

SEQ ID NO: 816702 - RNA, 20 nt, Artificial Sequence
  Synthetic
aaaaaugcacaaagaauacu

SEQ ID NO: 816703 - RNA, 20 nt, Artificial Sequence
  Synthetic
caaggaaaacacagaauacu

SEQ ID NO: 816704 - RNA, 20 nt, Artificial Sequence
  Synthetic
auacuaggauguagaauacu

SEQ ID NO: 816705 - RNA, 20 nt, Artificial Sequence
  Synthetic
cuguugugcuaucgaauacu

SEQ ID NO: 816706 - RNA, 20 nt, Artificial Sequence
  Synthetic
ugacaaaagguuugaauacu

SEQ ID NO: 816707 - RNA, 20 nt, Artificial Sequence
  Synthetic
augaggaugaagauaauacu

SEQ ID NO: 816708 - RNA, 20 nt, Artificial Sequence
  Synthetic
uuuauuuagaaucuaauacu

SEQ ID NO: 816709 - RNA, 20 nt, Artificial Sequence
  Synthetic
cuguaaauguaucuaauacu

SEQ ID NO: 816710 - RNA, 20 nt, Artificial Sequence
  Synthetic
uuggagcucuaaguaauacu

SEQ ID NO: 816711 - RNA, 20 nt, Artificial Sequence
  Synthetic
uaacguuaaaaauuaauacu

SEQ ID NO: 816712 - RNA, 20 nt, Artificial Sequence
  Synthetic
uuuuuuuaguguuuaauacu

SEQ ID NO: 816713 - RNA, 20 nt, Artificial Sequence
  Synthetic
agcuuaaaauuaaacauacu

SEQ ID NO: 816714 - RNA, 20 nt, Artificial Sequence
  Synthetic
uccaaaauugaccacauacu

SEQ ID NO: 816715 - RNA, 20 nt, Artificial Sequence
  Synthetic
ucauaacccuuucccauacu

SEQ ID NO: 816716 - RNA, 20 nt, Artificial Sequence
  Synthetic
uacaaguaucuagccauacu

SEQ ID NO: 816717 - RNA, 20 nt, Artificial Sequence
  Synthetic
uggcacucuugcagcauacu

SEQ ID NO: 816718 - RNA, 20 nt, Artificial Sequence
  Synthetic
aaagauuuguagagcauacu

SEQ ID NO: 816719 - RNA, 20 nt, Artificial Sequence
  Synthetic
agauaaacacaagucauacu

SEQ ID NO: 816720 - RNA, 20 nt, Artificial Sequence
  Synthetic
uguaucagugaugucauacu

SEQ ID NO: 816721 - RNA, 20 nt, Artificial Sequence
  Synthetic
cauuagaagggauucauacu

SEQ ID NO: 816722 - RNA, 20 nt, Artificial Sequence
  Synthetic
ugccuguaaucccagauacu

SEQ ID NO: 816723 - RNA, 20 nt, Artificial Sequence
  Synthetic
uucuggauuuaguagauacu

SEQ ID NO: 816724 - RNA, 20 nt, Artificial Sequence
  Synthetic
aaaucgugcuuuucgauacu

SEQ ID NO: 816725 - RNA, 20 nt, Artificial Sequence
  Synthetic
aaauacaaauaaaugauacu

SEQ ID NO: 816726 - RNA, 20 nt, Artificial Sequence
  Synthetic
aggagaacugaacugauacu

SEQ ID NO: 816727 - RNA, 20 nt, Artificial Sequence
  Synthetic
agacagauucaagugauacu

SEQ ID NO: 816728 - RNA, 20 nt, Artificial Sequence
  Synthetic
aaaaggcacuaagugauacu

SEQ ID NO: 816729 - RNA, 20 nt, Artificial Sequence
  Synthetic
auauuuuucuuuuugauacu

SEQ ID NO: 816730 - RNA, 20 nt, Artificial Sequence
  Synthetic
uauauuucaacuaauauacu

SEQ ID NO: 816731 - RNA, 20 nt, Artificial Sequence
  Synthetic
uuggaguugaugcauauacu

SEQ ID NO: 816732 - RNA, 20 nt, Artificial Sequence
  Synthetic
aaacaucaagaucauauacu

SEQ ID NO: 816733 - RNA, 20 nt, Artificial Sequence
  Synthetic
aauugugauuuggauauacu

SEQ ID NO: 816734 - RNA, 20 nt, Artificial Sequence
  Synthetic
aggccuggcugguauauacu

SEQ ID NO: 816735 - RNA, 20 nt, Artificial Sequence
  Synthetic
ugacuuagagcugcuauacu

SEQ ID NO: 816736 - RNA, 20 nt, Artificial Sequence
  Synthetic
cuguuuaagaaaaguauacu

SEQ ID NO: 816737 - RNA, 20 nt, Artificial Sequence
  Synthetic
aauuuuguucagaguauacu

SEQ ID NO: 816738 - RNA, 20 nt, Artificial Sequence
  Synthetic
accagugucuacuguauacu

SEQ ID NO: 816739 - RNA, 20 nt, Artificial Sequence
  Synthetic
uuaugaaaaaugauuauacu

SEQ ID NO: 816740 - RNA, 20 nt, Artificial Sequence
  Synthetic
cugauuugcuuuauuauacu

SEQ ID NO: 816741 - RNA, 20 nt, Artificial Sequence
  Synthetic
aucugugggaaaguuauacu

SEQ ID NO: 816742 - RNA, 20 nt, Artificial Sequence
  Synthetic
ugcuaauuagccuuuauacu

SEQ ID NO: 816743 - RNA, 20 nt, Artificial Sequence
  Synthetic
uuagcucuguauuuuauacu

SEQ ID NO: 816744 - RNA, 20 nt, Artificial Sequence
  Synthetic
ucauguacugggaaacuacu

SEQ ID NO: 816745 - RNA, 20 nt, Artificial Sequence
  Synthetic
aaaguauuuaauaaacuacu

SEQ ID NO: 816746 - RNA, 20 nt, Artificial Sequence
  Synthetic
cgccuguaaucccaacuacu

SEQ ID NO: 816747 - RNA, 20 nt, Artificial Sequence
  Synthetic
cacccacacacucaacuacu

SEQ ID NO: 816748 - RNA, 20 nt, Artificial Sequence
  Synthetic
uuuaauuuaggguaacuacu

SEQ ID NO: 816749 - RNA, 20 nt, Artificial Sequence
  Synthetic
ccugcuccugaaugacuacu

SEQ ID NO: 816750 - RNA, 20 nt, Artificial Sequence
  Synthetic
agcaaaaaauaaauacuacu

SEQ ID NO: 816751 - RNA, 20 nt, Artificial Sequence
  Synthetic
aaggcacagcagguacuacu

SEQ ID NO: 816752 - RNA, 20 nt, Artificial Sequence
  Synthetic
cugcugugaaauuuacuacu

SEQ ID NO: 816753 - RNA, 20 nt, Artificial Sequence
  Synthetic
aaauaaggcugagaccuacu

SEQ ID NO: 816754 - RNA, 20 nt, Artificial Sequence
  Synthetic
uguacuuuuaaauaccuacu

SEQ ID NO: 816755 - RNA, 20 nt, Artificial Sequence
  Synthetic
cucaagcagucugcccuacu

SEQ ID NO: 816756 - RNA, 20 nt, Artificial Sequence
  Synthetic
auuuugacuucaaagcuacu

SEQ ID NO: 816757 - RNA, 20 nt, Artificial Sequence
  Synthetic
ugacuugaaucacagcuacu

SEQ ID NO: 816758 - RNA, 20 nt, Artificial Sequence
  Synthetic
cgccuguaguaccagcuacu

SEQ ID NO: 816759 - RNA, 20 nt, Artificial Sequence
  Synthetic
ugccuauaaucccagcuacu

SEQ ID NO: 816760 - RNA, 20 nt, Artificial Sequence
  Synthetic
cgccucuaaucccagcuacu

SEQ ID NO: 816761 - RNA, 20 nt, Artificial Sequence
  Synthetic
ugccucuaaucccagcuacu

SEQ ID NO: 816762 - RNA, 20 nt, Artificial Sequence
  Synthetic
caccuguaaucccagcuacu

SEQ ID NO: 816763 - RNA, 20 nt, Artificial Sequence
  Synthetic
ucccuguaaucccagcuacu

SEQ ID NO: 816764 - RNA, 20 nt, Artificial Sequence
  Synthetic
cgccuguaaucccagcuacu

SEQ ID NO: 816765 - RNA, 20 nt, Artificial Sequence
  Synthetic
ugccuguaaucccagcuacu

SEQ ID NO: 816766 - RNA, 20 nt, Artificial Sequence
  Synthetic
cuccuguaaucccagcuacu

SEQ ID NO: 816767 - RNA, 20 nt, Artificial Sequence
  Synthetic
uggcuguaaucccagcuacu

SEQ ID NO: 816768 - RNA, 20 nt, Artificial Sequence
  Synthetic
caucuguaaucccagcuacu

SEQ ID NO: 816769 - RNA, 20 nt, Artificial Sequence
  Synthetic
ugcuuguaaucccagcuacu

SEQ ID NO: 816770 - RNA, 20 nt, Artificial Sequence
  Synthetic
ugccuagagucccagcuacu

SEQ ID NO: 816771 - RNA, 20 nt, Artificial Sequence
  Synthetic
cgccuauagucccagcuacu

SEQ ID NO: 816772 - RNA, 20 nt, Artificial Sequence
  Synthetic
ugccgguagucccagcuacu

SEQ ID NO: 816773 - RNA, 20 nt, Artificial Sequence
  Synthetic
caccuguagucccagcuacu

SEQ ID NO: 816774 - RNA, 20 nt, Artificial Sequence
  Synthetic
cgccuguagucccagcuacu

SEQ ID NO: 816775 - RNA, 20 nt, Artificial Sequence
  Synthetic
ugccuguagucccagcuacu

SEQ ID NO: 816776 - RNA, 20 nt, Artificial Sequence
  Synthetic
caucuguagucccagcuacu

SEQ ID NO: 816777 - RNA, 20 nt, Artificial Sequence
  Synthetic
cgcuuguagucccagcuacu

SEQ ID NO: 816778 - RNA, 20 nt, Artificial Sequence
  Synthetic
aguuuguagucccagcuacu

SEQ ID NO: 816779 - RNA, 20 nt, Artificial Sequence
  Synthetic
cgccuguggucccagcuacu

SEQ ID NO: 816780 - RNA, 20 nt, Artificial Sequence
  Synthetic
ugccuguggucccagcuacu

SEQ ID NO: 816781 - RNA, 20 nt, Artificial Sequence
  Synthetic
agccuguaaugccagcuacu

SEQ ID NO: 816782 - RNA, 20 nt, Artificial Sequence
  Synthetic
cugaagggacaucagcuacu

SEQ ID NO: 816783 - RNA, 20 nt, Artificial Sequence
  Synthetic
caccuguaaucucagcuacu

SEQ ID NO: 816784 - RNA, 20 nt, Artificial Sequence
  Synthetic
caccuguagucucagcuacu

SEQ ID NO: 816785 - RNA, 20 nt, Artificial Sequence
  Synthetic
uauguuacauuugagcuacu

SEQ ID NO: 816786 - RNA, 20 nt, Artificial Sequence
  Synthetic
caccaguaauccuagcuacu

SEQ ID NO: 816787 - RNA, 20 nt, Artificial Sequence
  Synthetic
cgccuguaauccuagcuacu

SEQ ID NO: 816788 - RNA, 20 nt, Artificial Sequence
  Synthetic
ugccaacacuuuuagcuacu

SEQ ID NO: 816789 - RNA, 20 nt, Artificial Sequence
  Synthetic
uuagaaugaaaauggcuacu

SEQ ID NO: 816790 - RNA, 20 nt, Artificial Sequence
  Synthetic
ugccuguagaccuggcuacu

SEQ ID NO: 816791 - RNA, 20 nt, Artificial Sequence
  Synthetic
aaaauuuagaucuggcuacu

SEQ ID NO: 816792 - RNA, 20 nt, Artificial Sequence
  Synthetic
ugccuguaguuccugcuacu

SEQ ID NO: 816793 - RNA, 20 nt, Artificial Sequence
  Synthetic
ugccuguagucucugcuacu

SEQ ID NO: 816794 - RNA, 20 nt, Artificial Sequence
  Synthetic
auuuuacaggaguugcuacu

SEQ ID NO: 816795 - RNA, 20 nt, Artificial Sequence
  Synthetic
uuauuucuggguuugcuacu

SEQ ID NO: 816796 - RNA, 20 nt, Artificial Sequence
  Synthetic
uaaaaugagaccaaucuacu

SEQ ID NO: 816797 - RNA, 20 nt, Artificial Sequence
  Synthetic
caaaacacugguaaucuacu

SEQ ID NO: 816798 - RNA, 20 nt, Artificial Sequence
  Synthetic
cuccuucuuagacaucuacu

SEQ ID NO: 816799 - RNA, 20 nt, Artificial Sequence
  Synthetic
ugccuguaguuccaucuacu

SEQ ID NO: 816800 - RNA, 20 nt, Artificial Sequence
  Synthetic
augcuuacuggguaucuacu

SEQ ID NO: 816801 - RNA, 20 nt, Artificial Sequence
  Synthetic
ccucagagagaaccucuacu

SEQ ID NO: 816802 - RNA, 20 nt, Artificial Sequence
  Synthetic
uugggguuauauccucuacu

SEQ ID NO: 816803 - RNA, 20 nt, Artificial Sequence
  Synthetic
aagaaagaauuugcucuacu

SEQ ID NO: 816804 - RNA, 20 nt, Artificial Sequence
  Synthetic
aauuucuaccacggucuacu

SEQ ID NO: 816805 - RNA, 20 nt, Artificial Sequence
  Synthetic
auauauucucccugucuacu

SEQ ID NO: 816806 - RNA, 20 nt, Artificial Sequence
  Synthetic
aaggaagacuuuauucuacu

SEQ ID NO: 816807 - RNA, 20 nt, Artificial Sequence
  Synthetic
uaaauauuguuuguucuacu

SEQ ID NO: 816808 - RNA, 20 nt, Artificial Sequence
  Synthetic
aacaguucaguaaaaguacu

SEQ ID NO: 816809 - RNA, 20 nt, Artificial Sequence
  Synthetic
ccucagccucccaaaguacu

SEQ ID NO: 816810 - RNA, 20 nt, Artificial Sequence
  Synthetic
ccucggccucccaaaguacu

SEQ ID NO: 816811 - RNA, 20 nt, Artificial Sequence
  Synthetic
uugcuccuuuaucaaguacu

SEQ ID NO: 816812 - RNA, 20 nt, Artificial Sequence
  Synthetic
cuguuuguucaauaaguacu

SEQ ID NO: 816813 - RNA, 20 nt, Artificial Sequence
  Synthetic
cuucccaaguucuaaguacu

SEQ ID NO: 816814 - RNA, 20 nt, Artificial Sequence
  Synthetic
aauaauuaauauacaguacu

SEQ ID NO: 816815 - RNA, 20 nt, Artificial Sequence
  Synthetic
cacaaaucuguuccaguacu

SEQ ID NO: 816816 - RNA, 20 nt, Artificial Sequence
  Synthetic
auuucuaggaaaggaguacu

SEQ ID NO: 816817 - RNA, 20 nt, Artificial Sequence
  Synthetic
acaucuggcuacugaguacu

SEQ ID NO: 816818 - RNA, 20 nt, Artificial Sequence
  Synthetic
uugggagaaucacuaguacu

SEQ ID NO: 816819 - RNA, 20 nt, Artificial Sequence
  Synthetic
cccuuguuuaacuuaguacu

SEQ ID NO: 816820 - RNA, 20 nt, Artificial Sequence
  Synthetic
aaaauaacaaaauucguacu

SEQ ID NO: 816821 - RNA, 20 nt, Artificial Sequence
  Synthetic
ugccuguaaucccagguacu

SEQ ID NO: 816822 - RNA, 20 nt, Artificial Sequence
  Synthetic
caugauauaugccagguacu

SEQ ID NO: 816823 - RNA, 20 nt, Artificial Sequence
  Synthetic
cauacuguaugcuagguacu

SEQ ID NO: 816824 - RNA, 20 nt, Artificial Sequence
  Synthetic
uaggcauuggguuagguacu

SEQ ID NO: 816825 - RNA, 20 nt, Artificial Sequence
  Synthetic
aaaaauaacuaauggguacu

SEQ ID NO: 816826 - RNA, 20 nt, Artificial Sequence
  Synthetic
augaacauauuuuggguacu

SEQ ID NO: 816827 - RNA, 20 nt, Artificial Sequence
  Synthetic
uaggcccaguaauugguacu

SEQ ID NO: 816828 - RNA, 20 nt, Artificial Sequence
  Synthetic
aaaaucucuagauugguacu

SEQ ID NO: 816829 - RNA, 20 nt, Artificial Sequence
  Synthetic
uagaacuaauauaauguacu

SEQ ID NO: 816830 - RNA, 20 nt, Artificial Sequence
  Synthetic
ucauuuaggaagcauguacu

SEQ ID NO: 816831 - RNA, 20 nt, Artificial Sequence
  Synthetic
auacuuguucaucauguacu

SEQ ID NO: 816832 - RNA, 20 nt, Artificial Sequence
  Synthetic
augaaugccuacuauguacu

SEQ ID NO: 816833 - RNA, 20 nt, Artificial Sequence
  Synthetic
aaauugcaagagacuguacu

SEQ ID NO: 816834 - RNA, 20 nt, Artificial Sequence
  Synthetic
uuuaucugacaggcuguacu

SEQ ID NO: 816835 - RNA, 20 nt, Artificial Sequence
  Synthetic
uuuuuguuuuuguguguacu

SEQ ID NO: 816836 - RNA, 20 nt, Artificial Sequence
  Synthetic
acuaggaauucaaaauuacu

SEQ ID NO: 816837 - RNA, 20 nt, Artificial Sequence
  Synthetic
ucaccuuuuggcaaauuacu

SEQ ID NO: 816838 - RNA, 20 nt, Artificial Sequence
  Synthetic
uauaccaaguaccaauuacu

SEQ ID NO: 816839 - RNA, 20 nt, Artificial Sequence
  Synthetic
aucuuuguuguagaauuacu

SEQ ID NO: 816840 - RNA, 20 nt, Artificial Sequence
  Synthetic
cucagagucccugaauuacu

SEQ ID NO: 816841 - RNA, 20 nt, Artificial Sequence
  Synthetic
acagccuucugauaauuacu

SEQ ID NO: 816842 - RNA, 20 nt, Artificial Sequence
  Synthetic
uggagaacucaguaauuacu

SEQ ID NO: 816843 - RNA, 20 nt, Artificial Sequence
  Synthetic
aacucagccaucccauuacu

SEQ ID NO: 816844 - RNA, 20 nt, Artificial Sequence
  Synthetic
aaccuagugaucccauuacu

SEQ ID NO: 816845 - RNA, 20 nt, Artificial Sequence
  Synthetic
aacccagcaaugccauuacu

SEQ ID NO: 816846 - RNA, 20 nt, Artificial Sequence
  Synthetic
cacuaccuaaaugcauuacu

SEQ ID NO: 816847 - RNA, 20 nt, Artificial Sequence
  Synthetic
aacccagcaaucucauuacu

SEQ ID NO: 816848 - RNA, 20 nt, Artificial Sequence
  Synthetic
uuuuagagauggucauuacu

SEQ ID NO: 816849 - RNA, 20 nt, Artificial Sequence
  Synthetic
ccccucuuagguucauuacu

SEQ ID NO: 816850 - RNA, 20 nt, Artificial Sequence
  Synthetic
ugaauuugcuuuagauuacu

SEQ ID NO: 816851 - RNA, 20 nt, Artificial Sequence
  Synthetic
augugcccucugggauuacu

SEQ ID NO: 816852 - RNA, 20 nt, Artificial Sequence
  Synthetic
ugaagagugaguggauuacu

SEQ ID NO: 816853 - RNA, 20 nt, Artificial Sequence
  Synthetic
aaggcugaucuuggauuacu

SEQ ID NO: 816854 - RNA, 20 nt, Artificial Sequence
  Synthetic
cucagaaggaaaugauuacu

SEQ ID NO: 816855 - RNA, 20 nt, Artificial Sequence
  Synthetic
aguaaguaaaacauauuacu

SEQ ID NO: 816856 - RNA, 20 nt, Artificial Sequence
  Synthetic
augcaguaaauacuauuacu

SEQ ID NO: 816857 - RNA, 20 nt, Artificial Sequence
  Synthetic
aguaaauauugcguauuacu

SEQ ID NO: 816858 - RNA, 20 nt, Artificial Sequence
  Synthetic
auagggaaagauguauuacu

SEQ ID NO: 816859 - RNA, 20 nt, Artificial Sequence
  Synthetic
ugagauuuauauguauuacu

SEQ ID NO: 816860 - RNA, 20 nt, Artificial Sequence
  Synthetic
uacuaaauauuuguauuacu

SEQ ID NO: 816861 - RNA, 20 nt, Artificial Sequence
  Synthetic
cacaacggaauauuauuacu

SEQ ID NO: 816862 - RNA, 20 nt, Artificial Sequence
  Synthetic
ccccuauauaucuuauuacu

SEQ ID NO: 816863 - RNA, 20 nt, Artificial Sequence
  Synthetic
uaugaaauaauguuauuacu

SEQ ID NO: 816864 - RNA, 20 nt, Artificial Sequence
  Synthetic
cugacaugagguuuauuacu

SEQ ID NO: 816865 - RNA, 20 nt, Artificial Sequence
  Synthetic
ugucuuagcuaacacuuacu

SEQ ID NO: 816866 - RNA, 20 nt, Artificial Sequence
  Synthetic
aagcaaagauuacacuuacu

SEQ ID NO: 816867 - RNA, 20 nt, Artificial Sequence
  Synthetic
uccuuguucugcuacuuacu

SEQ ID NO: 816868 - RNA, 20 nt, Artificial Sequence
  Synthetic
acaaaaccauucaccuuacu

SEQ ID NO: 816869 - RNA, 20 nt, Artificial Sequence
  Synthetic
acuagacuguagaccuuacu

SEQ ID NO: 816870 - RNA, 20 nt, Artificial Sequence
  Synthetic
ugguucugauugaccuuacu

SEQ ID NO: 816871 - RNA, 20 nt, Artificial Sequence
  Synthetic
agcuuagaauuugccuuacu

SEQ ID NO: 816872 - RNA, 20 nt, Artificial Sequence
  Synthetic
ccccagucagacuccuuacu

SEQ ID NO: 816873 - RNA, 20 nt, Artificial Sequence
  Synthetic
caauuagcaaccaucuuacu

SEQ ID NO: 816874 - RNA, 20 nt, Artificial Sequence
  Synthetic
agguuccaagaacaguuacu

SEQ ID NO: 816875 - RNA, 20 nt, Artificial Sequence
  Synthetic
aacaagaaaguacaguuacu

SEQ ID NO: 816876 - RNA, 20 nt, Artificial Sequence
  Synthetic
ugccuguaaucccaguuacu

SEQ ID NO: 816877 - RNA, 20 nt, Artificial Sequence
  Synthetic
auguuucaaagucaguuacu

SEQ ID NO: 816878 - RNA, 20 nt, Artificial Sequence
  Synthetic
auguuaacugacgaguuacu

SEQ ID NO: 816879 - RNA, 20 nt, Artificial Sequence
  Synthetic
agugucacugcugaguuacu

SEQ ID NO: 816880 - RNA, 20 nt, Artificial Sequence
  Synthetic
uaguaaggauuuuaguuacu

SEQ ID NO: 816881 - RNA, 20 nt, Artificial Sequence
  Synthetic
ccagguagcaacacguuacu

SEQ ID NO: 816882 - RNA, 20 nt, Artificial Sequence
  Synthetic
aguuaaagcaugagguuacu

SEQ ID NO: 816883 - RNA, 20 nt, Artificial Sequence
  Synthetic
auuuugauaguuugguuacu

SEQ ID NO: 816884 - RNA, 20 nt, Artificial Sequence
  Synthetic
aaauuucacacaauguuacu

SEQ ID NO: 816885 - RNA, 20 nt, Artificial Sequence
  Synthetic
ucuugcacugcaauguuacu

SEQ ID NO: 816886 - RNA, 20 nt, Artificial Sequence
  Synthetic
uggugauaagagauguuacu

SEQ ID NO: 816887 - RNA, 20 nt, Artificial Sequence
  Synthetic
auuauaucacuuauguuacu

SEQ ID NO: 816888 - RNA, 20 nt, Artificial Sequence
  Synthetic
cagucagaacagguguuacu

SEQ ID NO: 816889 - RNA, 20 nt, Artificial Sequence
  Synthetic
agcuaacuaaauuuguuacu

SEQ ID NO: 816890 - RNA, 20 nt, Artificial Sequence
  Synthetic
uaguaaauaaccaauuuacu

SEQ ID NO: 816891 - RNA, 20 nt, Artificial Sequence
  Synthetic
acuagaagaggacauuuacu

SEQ ID NO: 816892 - RNA, 20 nt, Artificial Sequence
  Synthetic
uccuuuaugaaccauuuacu

SEQ ID NO: 816893 - RNA, 20 nt, Artificial Sequence
  Synthetic
auuucucuuaacuauuuacu

SEQ ID NO: 816894 - RNA, 20 nt, Artificial Sequence
  Synthetic
agcauauucuccuauuuacu

SEQ ID NO: 816895 - RNA, 20 nt, Artificial Sequence
  Synthetic
uauuuuauguucuauuuacu

SEQ ID NO: 816896 - RNA, 20 nt, Artificial Sequence
  Synthetic
uauuuuuuacaaacuuuacu

SEQ ID NO: 816897 - RNA, 20 nt, Artificial Sequence
  Synthetic
cguuccugaguuacuuuacu

SEQ ID NO: 816898 - RNA, 20 nt, Artificial Sequence
  Synthetic
acaguuaauguuacuuuacu

SEQ ID NO: 816899 - RNA, 20 nt, Artificial Sequence
  Synthetic
ccacggacaccaucuuuacu

SEQ ID NO: 816900 - RNA, 20 nt, Artificial Sequence
  Synthetic
cugagugaguuaucuuuacu

SEQ ID NO: 816901 - RNA, 20 nt, Artificial Sequence
  Synthetic
cuuucccuucucuguuuacu

SEQ ID NO: 816902 - RNA, 20 nt, Artificial Sequence
  Synthetic
accaccugcuucuguuuacu

SEQ ID NO: 816903 - RNA, 20 nt, Artificial Sequence
  Synthetic
ucaguaaggagaauuuuacu

SEQ ID NO: 816904 - RNA, 20 nt, Artificial Sequence
  Synthetic
accaugaauggaauuuuacu

SEQ ID NO: 816905 - RNA, 20 nt, Artificial Sequence
  Synthetic
agauaucuuuagauuuuacu

SEQ ID NO: 816906 - RNA, 20 nt, Artificial Sequence
  Synthetic
aagggguggacuauuuuacu

SEQ ID NO: 816907 - RNA, 20 nt, Artificial Sequence
  Synthetic
uaacugcaauaccuuuuacu

SEQ ID NO: 816908 - RNA, 20 nt, Artificial Sequence
  Synthetic
auaugaacugauuuuuuacu

SEQ ID NO: 816909 - RNA, 20 nt, Artificial Sequence
  Synthetic
uuauggagaugcaaaaaccu

SEQ ID NO: 816910 - RNA, 20 nt, Artificial Sequence
  Synthetic
auacaguauacuaaaaaccu

SEQ ID NO: 816911 - RNA, 20 nt, Artificial Sequence
  Synthetic
caccuaacuaguaaaaaccu

SEQ ID NO: 816912 - RNA, 20 nt, Artificial Sequence
  Synthetic
aaaaaaaauuuuaaaaaccu

SEQ ID NO: 816913 - RNA, 20 nt, Artificial Sequence
  Synthetic
ccuacauccucacaaaaccu

SEQ ID NO: 816914 - RNA, 20 nt, Artificial Sequence
  Synthetic
acaauguaacuucaaaaccu

SEQ ID NO: 816915 - RNA, 20 nt, Artificial Sequence
  Synthetic
agaaucgcagaagaaaaccu

SEQ ID NO: 816916 - RNA, 20 nt, Artificial Sequence
  Synthetic
aaaacccuagaagaaaaccu

SEQ ID NO: 816917 - RNA, 20 nt, Artificial Sequence
  Synthetic
aaaacucuagaagaaaaccu

SEQ ID NO: 816918 - RNA, 20 nt, Artificial Sequence
  Synthetic
uuauugugcagagaaaaccu

SEQ ID NO: 816919 - RNA, 20 nt, Artificial Sequence
  Synthetic
cgagaagaaugagaaaaccu

SEQ ID NO: 816920 - RNA, 20 nt, Artificial Sequence
  Synthetic
agcucuugugcggaaaaccu

SEQ ID NO: 816921 - RNA, 20 nt, Artificial Sequence
  Synthetic
uucuaccuacaugaaaaccu

SEQ ID NO: 816922 - RNA, 20 nt, Artificial Sequence
  Synthetic
acccaggaaacugaaaaccu

SEQ ID NO: 816923 - RNA, 20 nt, Artificial Sequence
  Synthetic
aucauuuguacuccaaaccu

SEQ ID NO: 816924 - RNA, 20 nt, Artificial Sequence
  Synthetic
cuuaaauuuuuuccaaaccu

SEQ ID NO: 816925 - RNA, 20 nt, Artificial Sequence
  Synthetic
ccaucaauuucagcaaaccu

SEQ ID NO: 816926 - RNA, 20 nt, Artificial Sequence
  Synthetic
aaacucuuucuugcaaaccu

SEQ ID NO: 816927 - RNA, 20 nt, Artificial Sequence
  Synthetic
aagagccuggguucaaaccu

SEQ ID NO: 816928 - RNA, 20 nt, Artificial Sequence
  Synthetic
auauguuauugcagaaaccu

SEQ ID NO: 816929 - RNA, 20 nt, Artificial Sequence
  Synthetic
ucagucacauggagaaaccu

SEQ ID NO: 816930 - RNA, 20 nt, Artificial Sequence
  Synthetic
uuugaacaguauagaaaccu

SEQ ID NO: 816931 - RNA, 20 nt, Artificial Sequence
  Synthetic
uugagcuugaauugaaaccu

SEQ ID NO: 816932 - RNA, 20 nt, Artificial Sequence
  Synthetic
aauaugucaggaauaaaccu

SEQ ID NO: 816933 - RNA, 20 nt, Artificial Sequence
  Synthetic
aucauuuuuacccuaaaccu

SEQ ID NO: 816934 - RNA, 20 nt, Artificial Sequence
  Synthetic
aaauaaccuuccuuaaaccu

SEQ ID NO: 816935 - RNA, 20 nt, Artificial Sequence
  Synthetic
aucuacauuaauuuaaaccu

SEQ ID NO: 816936 - RNA, 20 nt, Artificial Sequence
  Synthetic
auaaaauguaguuuaaaccu

SEQ ID NO: 816937 - RNA, 20 nt, Artificial Sequence
  Synthetic
uugaauuuucaccacaaccu

SEQ ID NO: 816938 - RNA, 20 nt, Artificial Sequence
  Synthetic
ucugguuucaugcacaaccu

SEQ ID NO: 816939 - RNA, 20 nt, Artificial Sequence
  Synthetic
acuuaacuuguauacaaccu

SEQ ID NO: 816940 - RNA, 20 nt, Artificial Sequence
  Synthetic
uagagcaaugauaccaaccu

SEQ ID NO: 816941 - RNA, 20 nt, Artificial Sequence
  Synthetic
ucucaucuuacuuccaaccu

SEQ ID NO: 816942 - RNA, 20 nt, Artificial Sequence
  Synthetic
cagaaguucaagagcaaccu

SEQ ID NO: 816943 - RNA, 20 nt, Artificial Sequence
  Synthetic
uaucuucaggagggcaaccu

SEQ ID NO: 816944 - RNA, 20 nt, Artificial Sequence
  Synthetic
caaagacaugcaaucaaccu

SEQ ID NO: 816945 - RNA, 20 nt, Artificial Sequence
  Synthetic
caaagacauggaaucaaccu

SEQ ID NO: 816946 - RNA, 20 nt, Artificial Sequence
  Synthetic
cagauguggccccucaaccu

SEQ ID NO: 816947 - RNA, 20 nt, Artificial Sequence
  Synthetic
cguacuuaauuguucaaccu

SEQ ID NO: 816948 - RNA, 20 nt, Artificial Sequence
  Synthetic
uuuuuccuucauuucaaccu

SEQ ID NO: 816949 - RNA, 20 nt, Artificial Sequence
  Synthetic
acugcacuauuaaagaaccu

SEQ ID NO: 816950 - RNA, 20 nt, Artificial Sequence
  Synthetic
aaaaugcuguccaagaaccu

SEQ ID NO: 816951 - RNA, 20 nt, Artificial Sequence
  Synthetic
ucaaguggguuagggaaccu

SEQ ID NO: 816952 - RNA, 20 nt, Artificial Sequence
  Synthetic
caggagaauggcaugaaccu

SEQ ID NO: 816953 - RNA, 20 nt, Artificial Sequence
  Synthetic
caugagaaucaccugaaccu

SEQ ID NO: 816954 - RNA, 20 nt, Artificial Sequence
  Synthetic
cgggagaaaggcgugaaccu

SEQ ID NO: 816955 - RNA, 20 nt, Artificial Sequence
  Synthetic
caggagaauggcgugaaccu

SEQ ID NO: 816956 - RNA, 20 nt, Artificial Sequence
  Synthetic
uuuauuagcugugugaaccu

SEQ ID NO: 816957 - RNA, 20 nt, Artificial Sequence
  Synthetic
caggagaaccacuugaaccu

SEQ ID NO: 816958 - RNA, 20 nt, Artificial Sequence
  Synthetic
caggagaaucacuugaaccu

SEQ ID NO: 816959 - RNA, 20 nt, Artificial Sequence
  Synthetic
caugagaagcgcuugaaccu

SEQ ID NO: 816960 - RNA, 20 nt, Artificial Sequence
  Synthetic
caggagaaucgcuugaaccu

SEQ ID NO: 816961 - RNA, 20 nt, Artificial Sequence
  Synthetic
uuggaggaucgcuugaaccu

SEQ ID NO: 816962 - RNA, 20 nt, Artificial Sequence
  Synthetic
cagcagaauugcuugaaccu

SEQ ID NO: 816963 - RNA, 20 nt, Artificial Sequence
  Synthetic
caggagaauugcuugaaccu

SEQ ID NO: 816964 - RNA, 20 nt, Artificial Sequence
  Synthetic
cgggaagauugcuugaaccu

SEQ ID NO: 816965 - RNA, 20 nt, Artificial Sequence
  Synthetic
caagaggauuucuugaaccu

SEQ ID NO: 816966 - RNA, 20 nt, Artificial Sequence
  Synthetic
aguuagugaguguugaaccu

SEQ ID NO: 816967 - RNA, 20 nt, Artificial Sequence
  Synthetic
caggagaauuguuugaaccu

SEQ ID NO: 816968 - RNA, 20 nt, Artificial Sequence
  Synthetic
uuauaaaggauuuugaaccu

SEQ ID NO: 816969 - RNA, 20 nt, Artificial Sequence
  Synthetic
ucacauuuuaaaaauaaccu

SEQ ID NO: 816970 - RNA, 20 nt, Artificial Sequence
  Synthetic
ucaagcaaguuaaauaaccu

SEQ ID NO: 816971 - RNA, 20 nt, Artificial Sequence
  Synthetic
auaugcuaccuucauaaccu

SEQ ID NO: 816972 - RNA, 20 nt, Artificial Sequence
  Synthetic
aaaacccuagaagauaaccu

SEQ ID NO: 816973 - RNA, 20 nt, Artificial Sequence
  Synthetic
auguaguaauuguauaaccu

SEQ ID NO: 816974 - RNA, 20 nt, Artificial Sequence
  Synthetic
cacaccacugcuuauaaccu

SEQ ID NO: 816975 - RNA, 20 nt, Artificial Sequence
  Synthetic
ucacucuucacugcuaaccu

SEQ ID NO: 816976 - RNA, 20 nt, Artificial Sequence
  Synthetic
acgccauugcacucuaaccu

SEQ ID NO: 816977 - RNA, 20 nt, Artificial Sequence
  Synthetic
uccucacaguggaguaaccu

SEQ ID NO: 816978 - RNA, 20 nt, Artificial Sequence
  Synthetic
acugacuagcucuguaaccu

SEQ ID NO: 816979 - RNA, 20 nt, Artificial Sequence
  Synthetic
ugcuuuucucuucuuaaccu

SEQ ID NO: 816980 - RNA, 20 nt, Artificial Sequence
  Synthetic
uucaagggggaaaaacaccu

SEQ ID NO: 816981 - RNA, 20 nt, Artificial Sequence
  Synthetic
cuugaaaucaaggaacaccu

SEQ ID NO: 816982 - RNA, 20 nt, Artificial Sequence
  Synthetic
cagcagcaucaugaacaccu

SEQ ID NO: 816983 - RNA, 20 nt, Artificial Sequence
  Synthetic
acacacacacacacacaccu

SEQ ID NO: 816984 - RNA, 20 nt, Artificial Sequence
  Synthetic
auauagccuacuacacaccu

SEQ ID NO: 816985 - RNA, 20 nt, Artificial Sequence
  Synthetic
aaagcacuuaguacacaccu

SEQ ID NO: 816986 - RNA, 20 nt, Artificial Sequence
  Synthetic
augauuucaacaagacaccu

SEQ ID NO: 816987 - RNA, 20 nt, Artificial Sequence
  Synthetic
aacaaaugagggagacaccu

SEQ ID NO: 816988 - RNA, 20 nt, Artificial Sequence
  Synthetic
aaacuucugccuggacaccu

SEQ ID NO: 816989 - RNA, 20 nt, Artificial Sequence
  Synthetic
uagccucuccuuugacaccu

SEQ ID NO: 816990 - RNA, 20 nt, Artificial Sequence
  Synthetic
uuucuguucagcauacaccu

SEQ ID NO: 816991 - RNA, 20 nt, Artificial Sequence
  Synthetic
uuucuguuggauauacaccu

SEQ ID NO: 816992 - RNA, 20 nt, Artificial Sequence
  Synthetic
cuuuucagcaaaguacaccu

SEQ ID NO: 816993 - RNA, 20 nt, Artificial Sequence
  Synthetic
uuggaugauaacaaccaccu

SEQ ID NO: 816994 - RNA, 20 nt, Artificial Sequence
  Synthetic
aaguggcucauuaaccaccu

SEQ ID NO: 816995 - RNA, 20 nt, Artificial Sequence
  Synthetic
cucaugcaacccacccaccu

SEQ ID NO: 816996 - RNA, 20 nt, Artificial Sequence
  Synthetic
accucaugauccacccaccu

SEQ ID NO: 816997 - RNA, 20 nt, Artificial Sequence
  Synthetic
cugaagugauccacccaccu

SEQ ID NO: 816998 - RNA, 20 nt, Artificial Sequence
  Synthetic
accucgugauccacccaccu

SEQ ID NO: 816999 - RNA, 20 nt, Artificial Sequence
  Synthetic
cucaggugauccacccaccu

SEQ ID NO: 817000 - RNA, 20 nt, Artificial Sequence
  Synthetic
uucaggugauccacccaccu

SEQ ID NO: 817001 - RNA, 20 nt, Artificial Sequence
  Synthetic
ugauccucccacccccaccu

SEQ ID NO: 817002 - RNA, 20 nt, Artificial Sequence
  Synthetic
aauauucugcccgcccaccu

SEQ ID NO: 817003 - RNA, 20 nt, Artificial Sequence
  Synthetic
cucaagugauccgcccaccu

SEQ ID NO: 817004 - RNA, 20 nt, Artificial Sequence
  Synthetic
accucgugauccgcccaccu

SEQ ID NO: 817005 - RNA, 20 nt, Artificial Sequence
  Synthetic
aucucgugauccgcccaccu

SEQ ID NO: 817006 - RNA, 20 nt, Artificial Sequence
  Synthetic
cucaggugauccgcccaccu

SEQ ID NO: 817007 - RNA, 20 nt, Artificial Sequence
  Synthetic
acuuugugauccgcccaccu

SEQ ID NO: 817008 - RNA, 20 nt, Artificial Sequence
  Synthetic
cucaagcaaucugcccaccu

SEQ ID NO: 817009 - RNA, 20 nt, Artificial Sequence
  Synthetic
accucaugaucugcccaccu

SEQ ID NO: 817010 - RNA, 20 nt, Artificial Sequence
  Synthetic
cucaagugaucugcccaccu

SEQ ID NO: 817011 - RNA, 20 nt, Artificial Sequence
  Synthetic
accucgugaucugcccaccu

SEQ ID NO: 817012 - RNA, 20 nt, Artificial Sequence
  Synthetic
cucaggugaucugcccaccu

SEQ ID NO: 817013 - RNA, 20 nt, Artificial Sequence
  Synthetic
cucaaucgauaaucccaccu

SEQ ID NO: 817014 - RNA, 20 nt, Artificial Sequence
  Synthetic
uagugaugacagucccaccu

SEQ ID NO: 817015 - RNA, 20 nt, Artificial Sequence
  Synthetic
cacugcaaccuccgccaccu

SEQ ID NO: 817016 - RNA, 20 nt, Artificial Sequence
  Synthetic
aagggagaauaaauccaccu

SEQ ID NO: 817017 - RNA, 20 nt, Artificial Sequence
  Synthetic
ucuauucaccuuauccaccu

SEQ ID NO: 817018 - RNA, 20 nt, Artificial Sequence
  Synthetic
aacagauuuuaaaagcaccu

SEQ ID NO: 817019 - RNA, 20 nt, Artificial Sequence
  Synthetic
aaauauacuccacagcaccu

SEQ ID NO: 817020 - RNA, 20 nt, Artificial Sequence
  Synthetic
ccaauauucaugaggcaccu

SEQ ID NO: 817021 - RNA, 20 nt, Artificial Sequence
  Synthetic
cccacggugagagggcaccu

SEQ ID NO: 817022 - RNA, 20 nt, Artificial Sequence
  Synthetic
uccaccauuaaugggcaccu

SEQ ID NO: 817023 - RNA, 20 nt, Artificial Sequence
  Synthetic
ucugccacugaugggcaccu

SEQ ID NO: 817024 - RNA, 20 nt, Artificial Sequence
  Synthetic
uccaccacuggugggcaccu

SEQ ID NO: 817025 - RNA, 20 nt, Artificial Sequence
  Synthetic
uucuuuauuugugugcaccu

SEQ ID NO: 817026 - RNA, 20 nt, Artificial Sequence
  Synthetic
auugaaucuguaaaucaccu

SEQ ID NO: 817027 - RNA, 20 nt, Artificial Sequence
  Synthetic
auugcguaucugaaucaccu

SEQ ID NO: 817028 - RNA, 20 nt, Artificial Sequence
  Synthetic
ccagagcacagacaucaccu

SEQ ID NO: 817029 - RNA, 20 nt, Artificial Sequence
  Synthetic
ugacagcagcagcaucaccu

SEQ ID NO: 817030 - RNA, 20 nt, Artificial Sequence
  Synthetic
cagcaugagugucaucaccu

SEQ ID NO: 817031 - RNA, 20 nt, Artificial Sequence
  Synthetic
uacagauuauuucaucaccu

SEQ ID NO: 817032 - RNA, 20 nt, Artificial Sequence
  Synthetic
acugaaugcuuauaucaccu

SEQ ID NO: 817033 - RNA, 20 nt, Artificial Sequence
  Synthetic
agaaauggaugcuaucaccu

SEQ ID NO: 817034 - RNA, 20 nt, Artificial Sequence
  Synthetic
cucaggugauccacucaccu

SEQ ID NO: 817035 - RNA, 20 nt, Artificial Sequence
  Synthetic
caauugucccaggcucaccu

SEQ ID NO: 817036 - RNA, 20 nt, Artificial Sequence
  Synthetic
aucugugcaaugcgucaccu

SEQ ID NO: 817037 - RNA, 20 nt, Artificial Sequence
  Synthetic
agugugcacaggauucaccu

SEQ ID NO: 817038 - RNA, 20 nt, Artificial Sequence
  Synthetic
aacacaaauuaaguucaccu

SEQ ID NO: 817039 - RNA, 20 nt, Artificial Sequence
  Synthetic
aucucaugauccguucaccu

SEQ ID NO: 817040 - RNA, 20 nt, Artificial Sequence
  Synthetic
cucaggugauccguucaccu

SEQ ID NO: 817041 - RNA, 20 nt, Artificial Sequence
  Synthetic
ugugagcuucaauuucaccu

SEQ ID NO: 817042 - RNA, 20 nt, Artificial Sequence
  Synthetic
auccacaaaccuuuucaccu

SEQ ID NO: 817043 - RNA, 20 nt, Artificial Sequence
  Synthetic
uuaggaaggcagcaagaccu

SEQ ID NO: 817044 - RNA, 20 nt, Artificial Sequence
  Synthetic
uauugggugugucaagaccu

SEQ ID NO: 817045 - RNA, 20 nt, Artificial Sequence
  Synthetic
aacgagaauugagaagaccu

SEQ ID NO: 817046 - RNA, 20 nt, Artificial Sequence
  Synthetic
aggaaaggugcugaagaccu

SEQ ID NO: 817047 - RNA, 20 nt, Artificial Sequence
  Synthetic
aguuaccaacucuaagaccu

SEQ ID NO: 817048 - RNA, 20 nt, Artificial Sequence
  Synthetic
uccaaaagcuacacagaccu

SEQ ID NO: 817049 - RNA, 20 nt, Artificial Sequence
  Synthetic
auacauuauuccacagaccu

SEQ ID NO: 817050 - RNA, 20 nt, Artificial Sequence
  Synthetic
cuuauguuaaggccagaccu

SEQ ID NO: 817051 - RNA, 20 nt, Artificial Sequence
  Synthetic
cuuuggccucccagagaccu

SEQ ID NO: 817052 - RNA, 20 nt, Artificial Sequence
  Synthetic
aaauaacuuugcauagaccu

SEQ ID NO: 817053 - RNA, 20 nt, Artificial Sequence
  Synthetic
auaaauacuaaacuagaccu

SEQ ID NO: 817054 - RNA, 20 nt, Artificial Sequence
  Synthetic
aaugggaggcagcacgaccu

SEQ ID NO: 817055 - RNA, 20 nt, Artificial Sequence
  Synthetic
augaagaugagaaaggaccu

SEQ ID NO: 817056 - RNA, 20 nt, Artificial Sequence
  Synthetic
acuauuaagcuaaaggaccu

SEQ ID NO: 817057 - RNA, 20 nt, Artificial Sequence
  Synthetic
uaucacgugguucaggaccu

SEQ ID NO: 817058 - RNA, 20 nt, Artificial Sequence
  Synthetic
cauguccuuuuugaggaccu

SEQ ID NO: 817059 - RNA, 20 nt, Artificial Sequence
  Synthetic
uggucuugaucuccggaccu

SEQ ID NO: 817060 - RNA, 20 nt, Artificial Sequence
  Synthetic
auaaugaaaaauugggaccu

SEQ ID NO: 817061 - RNA, 20 nt, Artificial Sequence
  Synthetic
aaaaaaaaaauuauggaccu

SEQ ID NO: 817062 - RNA, 20 nt, Artificial Sequence
  Synthetic
ccuaucuuucuccuggaccu

SEQ ID NO: 817063 - RNA, 20 nt, Artificial Sequence
  Synthetic
cagcagucugaaguggaccu

SEQ ID NO: 817064 - RNA, 20 nt, Artificial Sequence
  Synthetic
uuugcuguggaccaugaccu

SEQ ID NO: 817065 - RNA, 20 nt, Artificial Sequence
  Synthetic
aagcaauaucagcaugaccu

SEQ ID NO: 817066 - RNA, 20 nt, Artificial Sequence
  Synthetic
aaacuuuuaagauaugaccu

SEQ ID NO: 817067 - RNA, 20 nt, Artificial Sequence
  Synthetic
auuuucuagcucuaugaccu

SEQ ID NO: 817068 - RNA, 20 nt, Artificial Sequence
  Synthetic
aauuagguuuccacugaccu

SEQ ID NO: 817069 - RNA, 20 nt, Artificial Sequence
  Synthetic
ucuguuaacuugccugaccu

SEQ ID NO: 817070 - RNA, 20 nt, Artificial Sequence
  Synthetic
uggaagaagcacagugaccu

SEQ ID NO: 817071 - RNA, 20 nt, Artificial Sequence
  Synthetic
accuuuuagcuuggugaccu

SEQ ID NO: 817072 - RNA, 20 nt, Artificial Sequence
  Synthetic
uuuuuaucaccaugugaccu

SEQ ID NO: 817073 - RNA, 20 nt, Artificial Sequence
  Synthetic
acuaggguggcaugugaccu

SEQ ID NO: 817074 - RNA, 20 nt, Artificial Sequence
  Synthetic
aaagagauagaaauugaccu

SEQ ID NO: 817075 - RNA, 20 nt, Artificial Sequence
  Synthetic
uuuuauuuaagaauugaccu

SEQ ID NO: 817076 - RNA, 20 nt, Artificial Sequence
  Synthetic
ugcaaccuccuccuugaccu

SEQ ID NO: 817077 - RNA, 20 nt, Artificial Sequence
  Synthetic
acaaagagaauaaaauaccu

SEQ ID NO: 817078 - RNA, 20 nt, Artificial Sequence
  Synthetic
ucaaagagaauaaaauaccu

SEQ ID NO: 817079 - RNA, 20 nt, Artificial Sequence
  Synthetic
cuggaaucucucaaauaccu

SEQ ID NO: 817080 - RNA, 20 nt, Artificial Sequence
  Synthetic
ccuggagagagacaauaccu

SEQ ID NO: 817081 - RNA, 20 nt, Artificial Sequence
  Synthetic
ugguaacauuguacauaccu

SEQ ID NO: 817082 - RNA, 20 nt, Artificial Sequence
  Synthetic
aaaauaugaagcccauaccu

SEQ ID NO: 817083 - RNA, 20 nt, Artificial Sequence
  Synthetic
aacaagaagaacugauaccu

SEQ ID NO: 817084 - RNA, 20 nt, Artificial Sequence
  Synthetic
aaaagaaaauucugauaccu

SEQ ID NO: 817085 - RNA, 20 nt, Artificial Sequence
  Synthetic
ucucgaucaccaauauaccu

SEQ ID NO: 817086 - RNA, 20 nt, Artificial Sequence
  Synthetic
cuuccagucaauauauaccu

SEQ ID NO: 817087 - RNA, 20 nt, Artificial Sequence
  Synthetic
aggaccugugaccuauaccu

SEQ ID NO: 817088 - RNA, 20 nt, Artificial Sequence
  Synthetic
uggcacauauaccuauaccu

SEQ ID NO: 817089 - RNA, 20 nt, Artificial Sequence
  Synthetic
accaugauacauguauaccu

SEQ ID NO: 817090 - RNA, 20 nt, Artificial Sequence
  Synthetic
cuuguucacccuguauaccu

SEQ ID NO: 817091 - RNA, 20 nt, Artificial Sequence
  Synthetic
agugggcacaagaacuaccu

SEQ ID NO: 817092 - RNA, 20 nt, Artificial Sequence
  Synthetic
auugaaauauauaacuaccu

SEQ ID NO: 817093 - RNA, 20 nt, Artificial Sequence
  Synthetic
caugaaaguagacacuaccu

SEQ ID NO: 817094 - RNA, 20 nt, Artificial Sequence
  Synthetic
caaugcagccauuacuaccu

SEQ ID NO: 817095 - RNA, 20 nt, Artificial Sequence
  Synthetic
cuuuuaauuuuaaccuaccu

SEQ ID NO: 817096 - RNA, 20 nt, Artificial Sequence
  Synthetic
cuaaagugauccaccuaccu

SEQ ID NO: 817097 - RNA, 20 nt, Artificial Sequence
  Synthetic
acucagaaccucaccuaccu

SEQ ID NO: 817098 - RNA, 20 nt, Artificial Sequence
  Synthetic
uucaagcaauacuccuaccu

SEQ ID NO: 817099 - RNA, 20 nt, Artificial Sequence
  Synthetic
aguaaaaguuuguccuaccu

SEQ ID NO: 817100 - RNA, 20 nt, Artificial Sequence
  Synthetic
accuguagucccagcuaccu

SEQ ID NO: 817101 - RNA, 20 nt, Artificial Sequence
  Synthetic
caucagaggaaucgcuaccu

SEQ ID NO: 817102 - RNA, 20 nt, Artificial Sequence
  Synthetic
auuguuuaauuuuucuaccu

SEQ ID NO: 817103 - RNA, 20 nt, Artificial Sequence
  Synthetic
agcucucucuuuuucuaccu

SEQ ID NO: 817104 - RNA, 20 nt, Artificial Sequence
  Synthetic
ccucagccucccaaguaccu

SEQ ID NO: 817105 - RNA, 20 nt, Artificial Sequence
  Synthetic
ccucagccuccgaaguaccu

SEQ ID NO: 817106 - RNA, 20 nt, Artificial Sequence
  Synthetic
agagcagagacuacguaccu

SEQ ID NO: 817107 - RNA, 20 nt, Artificial Sequence
  Synthetic
aaacagaagaguagguaccu

SEQ ID NO: 817108 - RNA, 20 nt, Artificial Sequence
  Synthetic
cuuucugguaccauguaccu

SEQ ID NO: 817109 - RNA, 20 nt, Artificial Sequence
  Synthetic
caaugguccgaacuguaccu

SEQ ID NO: 817110 - RNA, 20 nt, Artificial Sequence
  Synthetic
cagaagaauugcuuguaccu

SEQ ID NO: 817111 - RNA, 20 nt, Artificial Sequence
  Synthetic
aacucuagcauuaauuaccu

SEQ ID NO: 817112 - RNA, 20 nt, Artificial Sequence
  Synthetic
aagaucuauauacauuaccu

SEQ ID NO: 817113 - RNA, 20 nt, Artificial Sequence
  Synthetic
ucauugaauccccauuaccu

SEQ ID NO: 817114 - RNA, 20 nt, Artificial Sequence
  Synthetic
ucaguuggugagcauuaccu

SEQ ID NO: 817115 - RNA, 20 nt, Artificial Sequence
  Synthetic
auaauauuuucagauuaccu

SEQ ID NO: 817116 - RNA, 20 nt, Artificial Sequence
  Synthetic
uccuauaaaugcuauuaccu

SEQ ID NO: 817117 - RNA, 20 nt, Artificial Sequence
  Synthetic
cucuuuuaucucccuuaccu

SEQ ID NO: 817118 - RNA, 20 nt, Artificial Sequence
  Synthetic
auuuuauugauuccuuaccu

SEQ ID NO: 817119 - RNA, 20 nt, Artificial Sequence
  Synthetic
acuauuuucuuuucuuaccu

SEQ ID NO: 817120 - RNA, 20 nt, Artificial Sequence
  Synthetic
auauaauauaauaguuaccu

SEQ ID NO: 817121 - RNA, 20 nt, Artificial Sequence
  Synthetic
cacacauugcacuguuaccu

SEQ ID NO: 817122 - RNA, 20 nt, Artificial Sequence
  Synthetic
aacgugcagguuuguuaccu

SEQ ID NO: 817123 - RNA, 20 nt, Artificial Sequence
  Synthetic
cuuuguaauuaacuuuaccu

SEQ ID NO: 817124 - RNA, 20 nt, Artificial Sequence
  Synthetic
acugccucucagguuuaccu

SEQ ID NO: 817125 - RNA, 20 nt, Artificial Sequence
  Synthetic
aauaagauuuauuuuuaccu

SEQ ID NO: 817126 - RNA, 20 nt, Artificial Sequence
  Synthetic
aaguacuaccauaaaacccu

SEQ ID NO: 817127 - RNA, 20 nt, Artificial Sequence
  Synthetic
aacaaucaaccccaaacccu

SEQ ID NO: 817128 - RNA, 20 nt, Artificial Sequence
  Synthetic
ucauaagcuccccaaacccu

SEQ ID NO: 817129 - RNA, 20 nt, Artificial Sequence
  Synthetic
ucuuuaaguaaguaaacccu

SEQ ID NO: 817130 - RNA, 20 nt, Artificial Sequence
  Synthetic
caucgccuuuucugaacccu

SEQ ID NO: 817131 - RNA, 20 nt, Artificial Sequence
  Synthetic
ccaucucuaagucuaacccu

SEQ ID NO: 817132 - RNA, 20 nt, Artificial Sequence
  Synthetic
uagcucacgucuguaacccu

SEQ ID NO: 817133 - RNA, 20 nt, Artificial Sequence
  Synthetic
agcauuucuagacacacccu

SEQ ID NO: 817134 - RNA, 20 nt, Artificial Sequence
  Synthetic
cuuuuccauuucuacacccu

SEQ ID NO: 817135 - RNA, 20 nt, Artificial Sequence
  Synthetic
uuagucaggaaaaccacccu

SEQ ID NO: 817136 - RNA, 20 nt, Artificial Sequence
  Synthetic
uuuucucuucagcccacccu

SEQ ID NO: 817137 - RNA, 20 nt, Artificial Sequence
  Synthetic
uuaagcaauuuuagcacccu

SEQ ID NO: 817138 - RNA, 20 nt, Artificial Sequence
  Synthetic
cuuuuuauuuggggcacccu

SEQ ID NO: 817139 - RNA, 20 nt, Artificial Sequence
  Synthetic
uaacuuuuuccccucacccu

SEQ ID NO: 817140 - RNA, 20 nt, Artificial Sequence
  Synthetic
ucuaauuucuuuuucacccu

SEQ ID NO: 817141 - RNA, 20 nt, Artificial Sequence
  Synthetic
agagguagaaagaagacccu

SEQ ID NO: 817142 - RNA, 20 nt, Artificial Sequence
  Synthetic
auacgggaacaauagacccu

SEQ ID NO: 817143 - RNA, 20 nt, Artificial Sequence
  Synthetic
cuauuuucaguaaggacccu

SEQ ID NO: 817144 - RNA, 20 nt, Artificial Sequence
  Synthetic
uuaauuugaagcuggacccu

SEQ ID NO: 817145 - RNA, 20 nt, Artificial Sequence
  Synthetic
auaucacuauuuuggacccu

SEQ ID NO: 817146 - RNA, 20 nt, Artificial Sequence
  Synthetic
uagcaguuucacaugacccu

SEQ ID NO: 817147 - RNA, 20 nt, Artificial Sequence
  Synthetic
uauuuaaccuuucugacccu

SEQ ID NO: 817148 - RNA, 20 nt, Artificial Sequence
  Synthetic
ccagguuccuaaaauacccu

SEQ ID NO: 817149 - RNA, 20 nt, Artificial Sequence
  Synthetic
acuaaauuuaaauauacccu

SEQ ID NO: 817150 - RNA, 20 nt, Artificial Sequence
  Synthetic
agggucccaccauauacccu

SEQ ID NO: 817151 - RNA, 20 nt, Artificial Sequence
  Synthetic
uaaccagauguuuauacccu

SEQ ID NO: 817152 - RNA, 20 nt, Artificial Sequence
  Synthetic
auuguugauaguuguacccu

SEQ ID NO: 817153 - RNA, 20 nt, Artificial Sequence
  Synthetic
aagugguaauuuuguacccu

SEQ ID NO: 817154 - RNA, 20 nt, Artificial Sequence
  Synthetic
aagaucaaagggagaccccu

SEQ ID NO: 817155 - RNA, 20 nt, Artificial Sequence
  Synthetic
aauguggucuggggaccccu

SEQ ID NO: 817156 - RNA, 20 nt, Artificial Sequence
  Synthetic
uugcccaaagacuuaccccu

SEQ ID NO: 817157 - RNA, 20 nt, Artificial Sequence
  Synthetic
uauuucuaacccuuaccccu

SEQ ID NO: 817158 - RNA, 20 nt, Artificial Sequence
  Synthetic
acuaaaaacugcuuaccccu

SEQ ID NO: 817159 - RNA, 20 nt, Artificial Sequence
  Synthetic
uugugccucagucacccccu

SEQ ID NO: 817160 - RNA, 20 nt, Artificial Sequence
  Synthetic
ccuucuuuaucaugcccccu

SEQ ID NO: 817161 - RNA, 20 nt, Artificial Sequence
  Synthetic
ccuuaagaucaugucccccu

SEQ ID NO: 817162 - RNA, 20 nt, Artificial Sequence
  Synthetic
ugauucaauuacuucccccu

SEQ ID NO: 817163 - RNA, 20 nt, Artificial Sequence
  Synthetic
ugcauauguaaagagccccu

SEQ ID NO: 817164 - RNA, 20 nt, Artificial Sequence
  Synthetic
cccuguuaccuggagccccu

SEQ ID NO: 817165 - RNA, 20 nt, Artificial Sequence
  Synthetic
acaugauagagguugccccu

SEQ ID NO: 817166 - RNA, 20 nt, Artificial Sequence
  Synthetic
aucuaauuugaacauccccu

SEQ ID NO: 817167 - RNA, 20 nt, Artificial Sequence
  Synthetic
aucccaccuucuucuccccu

SEQ ID NO: 817168 - RNA, 20 nt, Artificial Sequence
  Synthetic
uauucaaauucaaguccccu

SEQ ID NO: 817169 - RNA, 20 nt, Artificial Sequence
  Synthetic
uaaagaagguugaguccccu

SEQ ID NO: 817170 - RNA, 20 nt, Artificial Sequence
  Synthetic
agagucucacucuguccccu

SEQ ID NO: 817171 - RNA, 20 nt, Artificial Sequence
  Synthetic
uuuaucucugauauuccccu

SEQ ID NO: 817172 - RNA, 20 nt, Artificial Sequence
  Synthetic
ccagagaagucauuuccccu

SEQ ID NO: 817173 - RNA, 20 nt, Artificial Sequence
  Synthetic
cuuauuauaagaaaagcccu

SEQ ID NO: 817174 - RNA, 20 nt, Artificial Sequence
  Synthetic
aguaaaagcaccuaagcccu

SEQ ID NO: 817175 - RNA, 20 nt, Artificial Sequence
  Synthetic
ccugcuaugcguuaagcccu

SEQ ID NO: 817176 - RNA, 20 nt, Artificial Sequence
  Synthetic
uaggggaggaguacagcccu

SEQ ID NO: 817177 - RNA, 20 nt, Artificial Sequence
  Synthetic
uaucgaucccucucagcccu

SEQ ID NO: 817178 - RNA, 20 nt, Artificial Sequence
  Synthetic
caagcugauggaagagcccu

SEQ ID NO: 817179 - RNA, 20 nt, Artificial Sequence
  Synthetic
caucuugcccaacuagcccu

SEQ ID NO: 817180 - RNA, 20 nt, Artificial Sequence
  Synthetic
cuuuucuuuacccuagcccu

SEQ ID NO: 817181 - RNA, 20 nt, Artificial Sequence
  Synthetic
uuuaggaauuagcuagcccu

SEQ ID NO: 817182 - RNA, 20 nt, Artificial Sequence
  Synthetic
uaaauuucuccuuuagcccu

SEQ ID NO: 817183 - RNA, 20 nt, Artificial Sequence
  Synthetic
acagcaagugcaaaggcccu

SEQ ID NO: 817184 - RNA, 20 nt, Artificial Sequence
  Synthetic
uucagcucaggcaaggcccu

SEQ ID NO: 817185 - RNA, 20 nt, Artificial Sequence
  Synthetic
ucuuuaugcaagcaggcccu

SEQ ID NO: 817186 - RNA, 20 nt, Artificial Sequence
  Synthetic
agcauaaccugaagggcccu

SEQ ID NO: 817187 - RNA, 20 nt, Artificial Sequence
  Synthetic
agcauaaucuuaagggcccu

SEQ ID NO: 817188 - RNA, 20 nt, Artificial Sequence
  Synthetic
aaaugaaaacgcagggcccu

SEQ ID NO: 817189 - RNA, 20 nt, Artificial Sequence
  Synthetic
acaaagggacuuagggcccu

SEQ ID NO: 817190 - RNA, 20 nt, Artificial Sequence
  Synthetic
uugagguaccacugggcccu

SEQ ID NO: 817191 - RNA, 20 nt, Artificial Sequence
  Synthetic
auaguauagugccuggcccu

SEQ ID NO: 817192 - RNA, 20 nt, Artificial Sequence
  Synthetic
ccucauauguugcuggcccu

SEQ ID NO: 817193 - RNA, 20 nt, Artificial Sequence
  Synthetic
aguaugagaacaacugcccu

SEQ ID NO: 817194 - RNA, 20 nt, Artificial Sequence
  Synthetic
ugugguuagcuaacugcccu

SEQ ID NO: 817195 - RNA, 20 nt, Artificial Sequence
  Synthetic
uguaaggcuauagcugcccu

SEQ ID NO: 817196 - RNA, 20 nt, Artificial Sequence
  Synthetic
cuuccaagaaaugcugcccu

SEQ ID NO: 817197 - RNA, 20 nt, Artificial Sequence
  Synthetic
acaauccuguucucugcccu

SEQ ID NO: 817198 - RNA, 20 nt, Artificial Sequence
  Synthetic
ugacaucuauuuucugcccu

SEQ ID NO: 817199 - RNA, 20 nt, Artificial Sequence
  Synthetic
cucugagugagaagugcccu

SEQ ID NO: 817200 - RNA, 20 nt, Artificial Sequence
  Synthetic
ucauccaggugaagugcccu

SEQ ID NO: 817201 - RNA, 20 nt, Artificial Sequence
  Synthetic
acaaguaggguccuugcccu

SEQ ID NO: 817202 - RNA, 20 nt, Artificial Sequence
  Synthetic
ucuguuuccaauguugcccu

SEQ ID NO: 817203 - RNA, 20 nt, Artificial Sequence
  Synthetic
agcguucaucauguugcccu

SEQ ID NO: 817204 - RNA, 20 nt, Artificial Sequence
  Synthetic
aaccauggaacuguugcccu

SEQ ID NO: 817205 - RNA, 20 nt, Artificial Sequence
  Synthetic
ugaacaauggagaaaucccu

SEQ ID NO: 817206 - RNA, 20 nt, Artificial Sequence
  Synthetic
aaauuuuuccaugaaucccu

SEQ ID NO: 817207 - RNA, 20 nt, Artificial Sequence
  Synthetic
agauuuuuuuuugaaucccu

SEQ ID NO: 817208 - RNA, 20 nt, Artificial Sequence
  Synthetic
acugauucauucacaucccu

SEQ ID NO: 817209 - RNA, 20 nt, Artificial Sequence
  Synthetic
acugcaacuucgacaucccu

SEQ ID NO: 817210 - RNA, 20 nt, Artificial Sequence
  Synthetic
uuagaguuuuuuccaucccu

SEQ ID NO: 817211 - RNA, 20 nt, Artificial Sequence
  Synthetic
uuuucccuccccucaucccu

SEQ ID NO: 817212 - RNA, 20 nt, Artificial Sequence
  Synthetic
aucaaguaggcuucaucccu

SEQ ID NO: 817213 - RNA, 20 nt, Artificial Sequence
  Synthetic
aucaagugggcuucaucccu

SEQ ID NO: 817214 - RNA, 20 nt, Artificial Sequence
  Synthetic
aucaaguuggcuucaucccu

SEQ ID NO: 817215 - RNA, 20 nt, Artificial Sequence
  Synthetic
uuuuuuuugcaaagaucccu

SEQ ID NO: 817216 - RNA, 20 nt, Artificial Sequence
  Synthetic
agggcaagaacaagaucccu

SEQ ID NO: 817217 - RNA, 20 nt, Artificial Sequence
  Synthetic
caacgugcgugcagaucccu

SEQ ID NO: 817218 - RNA, 20 nt, Artificial Sequence
  Synthetic
uauuuuuuuaauggaucccu

SEQ ID NO: 817219 - RNA, 20 nt, Artificial Sequence
  Synthetic
ucauuuggaagcugaucccu

SEQ ID NO: 817220 - RNA, 20 nt, Artificial Sequence
  Synthetic
aaucuaaauuucauaucccu

SEQ ID NO: 817221 - RNA, 20 nt, Artificial Sequence
  Synthetic
auaagcugaaauauaucccu

SEQ ID NO: 817222 - RNA, 20 nt, Artificial Sequence
  Synthetic
accaagagggauuuaucccu

SEQ ID NO: 817223 - RNA, 20 nt, Artificial Sequence
  Synthetic
ucagaaucccucaacucccu

SEQ ID NO: 817224 - RNA, 20 nt, Artificial Sequence
  Synthetic
agaacaaauuuucacucccu

SEQ ID NO: 817225 - RNA, 20 nt, Artificial Sequence
  Synthetic
aggcagggaacauacucccu

SEQ ID NO: 817226 - RNA, 20 nt, Artificial Sequence
  Synthetic
agucccacaguguacucccu

SEQ ID NO: 817227 - RNA, 20 nt, Artificial Sequence
  Synthetic
acugcagccuugaccucccu

SEQ ID NO: 817228 - RNA, 20 nt, Artificial Sequence
  Synthetic
cucuauuaaacucccucccu

SEQ ID NO: 817229 - RNA, 20 nt, Artificial Sequence
  Synthetic
cugcucugacugggcucccu

SEQ ID NO: 817230 - RNA, 20 nt, Artificial Sequence
  Synthetic
uagcucuuggauggcucccu

SEQ ID NO: 817231 - RNA, 20 nt, Artificial Sequence
  Synthetic
ugcgcuggguucugcucccu

SEQ ID NO: 817232 - RNA, 20 nt, Artificial Sequence
  Synthetic
uccauaaggcuucucucccu

SEQ ID NO: 817233 - RNA, 20 nt, Artificial Sequence
  Synthetic
augccagcuggugucucccu

SEQ ID NO: 817234 - RNA, 20 nt, Artificial Sequence
  Synthetic
cugucuucccauuucucccu

SEQ ID NO: 817235 - RNA, 20 nt, Artificial Sequence
  Synthetic
augcagggcaccuagucccu

SEQ ID NO: 817236 - RNA, 20 nt, Artificial Sequence
  Synthetic
ugauacagaaaaaugucccu

SEQ ID NO: 817237 - RNA, 20 nt, Artificial Sequence
  Synthetic
agacauuuccaaaugucccu

SEQ ID NO: 817238 - RNA, 20 nt, Artificial Sequence
  Synthetic
ccccagaaggccaugucccu

SEQ ID NO: 817239 - RNA, 20 nt, Artificial Sequence
  Synthetic
ucacuuugucuucugucccu

SEQ ID NO: 817240 - RNA, 20 nt, Artificial Sequence
  Synthetic
auaauauacuucuugucccu

SEQ ID NO: 817241 - RNA, 20 nt, Artificial Sequence
  Synthetic
cuaaguaaccuguugucccu

SEQ ID NO: 817242 - RNA, 20 nt, Artificial Sequence
  Synthetic
auauguuaucuuuugucccu

SEQ ID NO: 817243 - RNA, 20 nt, Artificial Sequence
  Synthetic
ucacguaacacaaauucccu

SEQ ID NO: 817244 - RNA, 20 nt, Artificial Sequence
  Synthetic
aaaaaagaacugaauucccu

SEQ ID NO: 817245 - RNA, 20 nt, Artificial Sequence
  Synthetic
uccucugccugccauucccu

SEQ ID NO: 817246 - RNA, 20 nt, Artificial Sequence
  Synthetic
cugugugagagagauucccu

SEQ ID NO: 817247 - RNA, 20 nt, Artificial Sequence
  Synthetic
ugcagaccaggagauucccu

SEQ ID NO: 817248 - RNA, 20 nt, Artificial Sequence
  Synthetic
cuuaaauguugcuauucccu

SEQ ID NO: 817249 - RNA, 20 nt, Artificial Sequence
  Synthetic
uaaaaauaaguaacuucccu

SEQ ID NO: 817250 - RNA, 20 nt, Artificial Sequence
  Synthetic
uuauuacugauuacuucccu

SEQ ID NO: 817251 - RNA, 20 nt, Artificial Sequence
  Synthetic
uuaauguguugcccuucccu

SEQ ID NO: 817252 - RNA, 20 nt, Artificial Sequence
  Synthetic
uguuucagaaguccuucccu

SEQ ID NO: 817253 - RNA, 20 nt, Artificial Sequence
  Synthetic
aaaaggauaggaucuucccu

SEQ ID NO: 817254 - RNA, 20 nt, Artificial Sequence
  Synthetic
cuaauacacuuaucuucccu

SEQ ID NO: 817255 - RNA, 20 nt, Artificial Sequence
  Synthetic
ugcaacaucaacucuucccu

SEQ ID NO: 817256 - RNA, 20 nt, Artificial Sequence
  Synthetic
cuugaaaaccucucuucccu

SEQ ID NO: 817257 - RNA, 20 nt, Artificial Sequence
  Synthetic
cuucuccccaauucuucccu

SEQ ID NO: 817258 - RNA, 20 nt, Artificial Sequence
  Synthetic
uucucuauuauuucuucccu

SEQ ID NO: 817259 - RNA, 20 nt, Artificial Sequence
  Synthetic
ugagaggaucuuucuucccu

SEQ ID NO: 817260 - RNA, 20 nt, Artificial Sequence
  Synthetic
cucucugaggaauguucccu

SEQ ID NO: 817261 - RNA, 20 nt, Artificial Sequence
  Synthetic
aucaucauuuaaauuucccu

SEQ ID NO: 817262 - RNA, 20 nt, Artificial Sequence
  Synthetic
aaaauugagugaauuucccu

SEQ ID NO: 817263 - RNA, 20 nt, Artificial Sequence
  Synthetic
cuggaggcugugauuucccu

SEQ ID NO: 817264 - RNA, 20 nt, Artificial Sequence
  Synthetic
ucauuggcuuugauuucccu

SEQ ID NO: 817265 - RNA, 20 nt, Artificial Sequence
  Synthetic
ugggcaucuacucuuucccu

SEQ ID NO: 817266 - RNA, 20 nt, Artificial Sequence
  Synthetic
acagcucucuauguuucccu

SEQ ID NO: 817267 - RNA, 20 nt, Artificial Sequence
  Synthetic
ugaucuugaacuguuucccu

SEQ ID NO: 817268 - RNA, 20 nt, Artificial Sequence
  Synthetic
aaagaacaagggcaaagccu

SEQ ID NO: 817269 - RNA, 20 nt, Artificial Sequence
  Synthetic
uaguauuaccugcaaagccu

SEQ ID NO: 817270 - RNA, 20 nt, Artificial Sequence
  Synthetic
ugacauuccagucaaagccu

SEQ ID NO: 817271 - RNA, 20 nt, Artificial Sequence
  Synthetic
agaauccuauaagaaagccu

SEQ ID NO: 817272 - RNA, 20 nt, Artificial Sequence
  Synthetic
augccacagcacuaaagccu

SEQ ID NO: 817273 - RNA, 20 nt, Artificial Sequence
  Synthetic
cacaaggaaguuuaaagccu

SEQ ID NO: 817274 - RNA, 20 nt, Artificial Sequence
  Synthetic
uuguuucaaacuccaagccu

SEQ ID NO: 817275 - RNA, 20 nt, Artificial Sequence
  Synthetic
aagccuugggcuucaagccu

SEQ ID NO: 817276 - RNA, 20 nt, Artificial Sequence
  Synthetic
cuuuucaaacaaagaagccu

SEQ ID NO: 817277 - RNA, 20 nt, Artificial Sequence
  Synthetic
aaaauguuuuauguaagccu

SEQ ID NO: 817278 - RNA, 20 nt, Artificial Sequence
  Synthetic
uuugacauucacaacagccu

SEQ ID NO: 817279 - RNA, 20 nt, Artificial Sequence
  Synthetic
ccggaguucaagaacagccu

SEQ ID NO: 817280 - RNA, 20 nt, Artificial Sequence
  Synthetic
ugagguaagaauaacagccu

SEQ ID NO: 817281 - RNA, 20 nt, Artificial Sequence
  Synthetic
agaaucuccucacacagccu

SEQ ID NO: 817282 - RNA, 20 nt, Artificial Sequence
  Synthetic
aaggugggcucccacagccu

SEQ ID NO: 817283 - RNA, 20 nt, Artificial Sequence
  Synthetic
ucugcauuuucccacagccu

SEQ ID NO: 817284 - RNA, 20 nt, Artificial Sequence
  Synthetic
acaccacugcacuacagccu

SEQ ID NO: 817285 - RNA, 20 nt, Artificial Sequence
  Synthetic
caaagcuaugucuacagccu

SEQ ID NO: 817286 - RNA, 20 nt, Artificial Sequence
  Synthetic
ccuacaaaucuguacagccu

SEQ ID NO: 817287 - RNA, 20 nt, Artificial Sequence
  Synthetic
caggaguucaaaaccagccu

SEQ ID NO: 817288 - RNA, 20 nt, Artificial Sequence
  Synthetic
caggaguccaagaccagccu

SEQ ID NO: 817289 - RNA, 20 nt, Artificial Sequence
  Synthetic
caggaguucaagaccagccu

SEQ ID NO: 817290 - RNA, 20 nt, Artificial Sequence
  Synthetic
caggaguucgagaccagccu

SEQ ID NO: 817291 - RNA, 20 nt, Artificial Sequence
  Synthetic
uaggagauugagaccagccu

SEQ ID NO: 817292 - RNA, 20 nt, Artificial Sequence
  Synthetic
cagaaguuugagaccagccu

SEQ ID NO: 817293 - RNA, 20 nt, Artificial Sequence
  Synthetic
caagaguuugagaccagccu

SEQ ID NO: 817294 - RNA, 20 nt, Artificial Sequence
  Synthetic
caggaguuugagaccagccu

SEQ ID NO: 817295 - RNA, 20 nt, Artificial Sequence
  Synthetic
caggaguuggauaccagccu

SEQ ID NO: 817296 - RNA, 20 nt, Artificial Sequence
  Synthetic
aaccaacugaaauccagccu

SEQ ID NO: 817297 - RNA, 20 nt, Artificial Sequence
  Synthetic
aaaggauuaacauccagccu

SEQ ID NO: 817298 - RNA, 20 nt, Artificial Sequence
  Synthetic
agaucaugccacuccagccu

SEQ ID NO: 817299 - RNA, 20 nt, Artificial Sequence
  Synthetic
acgacacuccacuccagccu

SEQ ID NO: 817300 - RNA, 20 nt, Artificial Sequence
  Synthetic
augccacuccacuccagccu

SEQ ID NO: 817301 - RNA, 20 nt, Artificial Sequence
  Synthetic
cugccacuccacuccagccu

SEQ ID NO: 817302 - RNA, 20 nt, Artificial Sequence
  Synthetic
cugucacagcacuccagccu

SEQ ID NO: 817303 - RNA, 20 nt, Artificial Sequence
  Synthetic
acaccacugcacuccagccu

SEQ ID NO: 817304 - RNA, 20 nt, Artificial Sequence
  Synthetic
agaccacugcacuccagccu

SEQ ID NO: 817305 - RNA, 20 nt, Artificial Sequence
  Synthetic
aagccacugcacuccagccu

SEQ ID NO: 817306 - RNA, 20 nt, Artificial Sequence
  Synthetic
acgccacugcacuccagccu

SEQ ID NO: 817307 - RNA, 20 nt, Artificial Sequence
  Synthetic
ccgccacugcacuccagccu

SEQ ID NO: 817308 - RNA, 20 nt, Artificial Sequence
  Synthetic
gcgccacugcacuccagccu

SEQ ID NO: 817309 - RNA, 20 nt, Artificial Sequence
  Synthetic
aggccacugcacuccagccu

SEQ ID NO: 817310 - RNA, 20 nt, Artificial Sequence
  Synthetic
augccacugcacuccagccu

SEQ ID NO: 817311 - RNA, 20 nt, Artificial Sequence
  Synthetic
cugccacugcacuccagccu

SEQ ID NO: 817312 - RNA, 20 nt, Artificial Sequence
  Synthetic
auugcacugcacuccagccu

SEQ ID NO: 817313 - RNA, 20 nt, Artificial Sequence
  Synthetic
augucacugcacuccagccu

SEQ ID NO: 817314 - RNA, 20 nt, Artificial Sequence
  Synthetic
aggcuacugcacuccagccu

SEQ ID NO: 817315 - RNA, 20 nt, Artificial Sequence
  Synthetic
acaccgcugcacuccagccu

SEQ ID NO: 817316 - RNA, 20 nt, Artificial Sequence
  Synthetic
augccgcugcacuccagccu

SEQ ID NO: 817317 - RNA, 20 nt, Artificial Sequence
  Synthetic
acaccauugcacuccagccu

SEQ ID NO: 817318 - RNA, 20 nt, Artificial Sequence
  Synthetic
auaccauugcacuccagccu

SEQ ID NO: 817319 - RNA, 20 nt, Artificial Sequence
  Synthetic
uggccauugcacuccagccu

SEQ ID NO: 817320 - RNA, 20 nt, Artificial Sequence
  Synthetic
augccauugcacuccagccu

SEQ ID NO: 817321 - RNA, 20 nt, Artificial Sequence
  Synthetic
cugagauugcacuccagccu

SEQ ID NO: 817322 - RNA, 20 nt, Artificial Sequence
  Synthetic
cacugcacucacuccagccu

SEQ ID NO: 817323 - RNA, 20 nt, Artificial Sequence
  Synthetic
augccaguguacuccagccu

SEQ ID NO: 817324 - RNA, 20 nt, Artificial Sequence
  Synthetic
augccacugcccuccagccu

SEQ ID NO: 817325 - RNA, 20 nt, Artificial Sequence
  Synthetic
ucccacauaaaguccagccu

SEQ ID NO: 817326 - RNA, 20 nt, Artificial Sequence
  Synthetic
ccaccacugcauuccagccu

SEQ ID NO: 817327 - RNA, 20 nt, Artificial Sequence
  Synthetic
acgccacugcauuccagccu

SEQ ID NO: 817328 - RNA, 20 nt, Artificial Sequence
  Synthetic
cauuaguuuuauuccagccu

SEQ ID NO: 817329 - RNA, 20 nt, Artificial Sequence
  Synthetic
auauuccaagauggcagccu

SEQ ID NO: 817330 - RNA, 20 nt, Artificial Sequence
  Synthetic
uagaaucucaacugcagccu

SEQ ID NO: 817331 - RNA, 20 nt, Artificial Sequence
  Synthetic
cccccugcuaugugcagccu

SEQ ID NO: 817332 - RNA, 20 nt, Artificial Sequence
  Synthetic
caggaguuugagaucagccu

SEQ ID NO: 817333 - RNA, 20 nt, Artificial Sequence
  Synthetic
ugggaguuugagaucagccu

SEQ ID NO: 817334 - RNA, 20 nt, Artificial Sequence
  Synthetic
auaucauacacacucagccu

SEQ ID NO: 817335 - RNA, 20 nt, Artificial Sequence
  Synthetic
caaagguaugaagucagccu

SEQ ID NO: 817336 - RNA, 20 nt, Artificial Sequence
  Synthetic
auaccacugcacuucagccu

SEQ ID NO: 817337 - RNA, 20 nt, Artificial Sequence
  Synthetic
cucaagugauccuucagccu

SEQ ID NO: 817338 - RNA, 20 nt, Artificial Sequence
  Synthetic
uucaguucauguuucagccu

SEQ ID NO: 817339 - RNA, 20 nt, Artificial Sequence
  Synthetic
uuguagcaaaaaaagagccu

SEQ ID NO: 817340 - RNA, 20 nt, Artificial Sequence
  Synthetic
cagcuuuugaaagagagccu

SEQ ID NO: 817341 - RNA, 20 nt, Artificial Sequence
  Synthetic
uucacguaguucucgagccu

SEQ ID NO: 817342 - RNA, 20 nt, Artificial Sequence
  Synthetic
uaaaugaaaacucggagccu

SEQ ID NO: 817343 - RNA, 20 nt, Artificial Sequence
  Synthetic
aaacagugcugugggagccu

SEQ ID NO: 817344 - RNA, 20 nt, Artificial Sequence
  Synthetic
ucauucuagcuugggagccu

SEQ ID NO: 817345 - RNA, 20 nt, Artificial Sequence
  Synthetic
aauaucugaaaauggagccu

SEQ ID NO: 817346 - RNA, 20 nt, Artificial Sequence
  Synthetic
acaaacacgcacaugagccu

SEQ ID NO: 817347 - RNA, 20 nt, Artificial Sequence
  Synthetic
aaauuuaugaugaugagccu

SEQ ID NO: 817348 - RNA, 20 nt, Artificial Sequence
  Synthetic
caauaggaucuccugagccu

SEQ ID NO: 817349 - RNA, 20 nt, Artificial Sequence
  Synthetic
aggagcucgugauugagccu

SEQ ID NO: 817350 - RNA, 20 nt, Artificial Sequence
  Synthetic
ugggcagaucacuugagccu

SEQ ID NO: 817351 - RNA, 20 nt, Artificial Sequence
  Synthetic
cugaaggaucacuugagccu

SEQ ID NO: 817352 - RNA, 20 nt, Artificial Sequence
  Synthetic
caggaggauugcuugagccu

SEQ ID NO: 817353 - RNA, 20 nt, Artificial Sequence
  Synthetic
aagauacaaaaaaauagccu

SEQ ID NO: 817354 - RNA, 20 nt, Artificial Sequence
  Synthetic
acaagguuaaaucauagccu

SEQ ID NO: 817355 - RNA, 20 nt, Artificial Sequence
  Synthetic
auaacuucuagucauagccu

SEQ ID NO: 817356 - RNA, 20 nt, Artificial Sequence
  Synthetic
uugacacggagagauagccu

SEQ ID NO: 817357 - RNA, 20 nt, Artificial Sequence
  Synthetic
ucccaagucuauccuagccu

SEQ ID NO: 817358 - RNA, 20 nt, Artificial Sequence
  Synthetic
uugcagaaaacugcuagccu

SEQ ID NO: 817359 - RNA, 20 nt, Artificial Sequence
  Synthetic
aauaaauauaaaucuagccu

SEQ ID NO: 817360 - RNA, 20 nt, Artificial Sequence
  Synthetic
acaccacugcacucuagccu

SEQ ID NO: 817361 - RNA, 20 nt, Artificial Sequence
  Synthetic
uugaucaucuuagguagccu

SEQ ID NO: 817362 - RNA, 20 nt, Artificial Sequence
  Synthetic
uaggcuauaucauguagccu

SEQ ID NO: 817363 - RNA, 20 nt, Artificial Sequence
  Synthetic
ccacauuaaaguuguagccu

SEQ ID NO: 817364 - RNA, 20 nt, Artificial Sequence
  Synthetic
uuuuuugaugguuuuagccu

SEQ ID NO: 817365 - RNA, 20 nt, Artificial Sequence
  Synthetic
aucagaugauccacccgccu

SEQ ID NO: 817366 - RNA, 20 nt, Artificial Sequence
  Synthetic
accucgugauccacccgccu

SEQ ID NO: 817367 - RNA, 20 nt, Artificial Sequence
  Synthetic
cucaggugauccacccgccu

SEQ ID NO: 817368 - RNA, 20 nt, Artificial Sequence
  Synthetic
uucaggugauccacccgccu

SEQ ID NO: 817369 - RNA, 20 nt, Artificial Sequence
  Synthetic
accuugugauccacccgccu

SEQ ID NO: 817370 - RNA, 20 nt, Artificial Sequence
  Synthetic
accucgugaucagcccgccu

SEQ ID NO: 817371 - RNA, 20 nt, Artificial Sequence
  Synthetic
acaucaugauccgcccgccu

SEQ ID NO: 817372 - RNA, 20 nt, Artificial Sequence
  Synthetic
accucaugauccgcccgccu

SEQ ID NO: 817373 - RNA, 20 nt, Artificial Sequence
  Synthetic
accuuaugauccgcccgccu

SEQ ID NO: 817374 - RNA, 20 nt, Artificial Sequence
  Synthetic
cucaagugauccgcccgccu

SEQ ID NO: 817375 - RNA, 20 nt, Artificial Sequence
  Synthetic
accucgugauccgcccgccu

SEQ ID NO: 817376 - RNA, 20 nt, Artificial Sequence
  Synthetic
cucuggcaguccgcccgccu

SEQ ID NO: 817377 - RNA, 20 nt, Artificial Sequence
  Synthetic
accucaugaucugcccgccu

SEQ ID NO: 817378 - RNA, 20 nt, Artificial Sequence
  Synthetic
accucgugaucugcccgccu

SEQ ID NO: 817379 - RNA, 20 nt, Artificial Sequence
  Synthetic
accuugugaucugcccgccu

SEQ ID NO: 817380 - RNA, 20 nt, Artificial Sequence
  Synthetic
cucaaaugaugugcccgccu

SEQ ID NO: 817381 - RNA, 20 nt, Artificial Sequence
  Synthetic
uugccacugcucucccgccu

SEQ ID NO: 817382 - RNA, 20 nt, Artificial Sequence
  Synthetic
ugccuuuuuguuugccgccu

SEQ ID NO: 817383 - RNA, 20 nt, Artificial Sequence
  Synthetic
ugcuguuuuaaugagcgccu

SEQ ID NO: 817384 - RNA, 20 nt, Artificial Sequence
  Synthetic
aggcuucugaaccuucgccu

SEQ ID NO: 817385 - RNA, 20 nt, Artificial Sequence
  Synthetic
cccaagauacugcaaggccu

SEQ ID NO: 817386 - RNA, 20 nt, Artificial Sequence
  Synthetic
auagggauauaagaaggccu

SEQ ID NO: 817387 - RNA, 20 nt, Artificial Sequence
  Synthetic
ugguucauaaaggaaggccu

SEQ ID NO: 817388 - RNA, 20 nt, Artificial Sequence
  Synthetic
ccccaccucgcgacaggccu

SEQ ID NO: 817389 - RNA, 20 nt, Artificial Sequence
  Synthetic
acacagcuauucucaggccu

SEQ ID NO: 817390 - RNA, 20 nt, Artificial Sequence
  Synthetic
agaggacuuuuaagaggccu

SEQ ID NO: 817391 - RNA, 20 nt, Artificial Sequence
  Synthetic
caucauaggaccagaggccu

SEQ ID NO: 817392 - RNA, 20 nt, Artificial Sequence
  Synthetic
cacccuccaucuggaggccu

SEQ ID NO: 817393 - RNA, 20 nt, Artificial Sequence
  Synthetic
uccuggaugagaugaggccu

SEQ ID NO: 817394 - RNA, 20 nt, Artificial Sequence
  Synthetic
auccugacccauguaggccu

SEQ ID NO: 817395 - RNA, 20 nt, Artificial Sequence
  Synthetic
ucaggcaucagucagggccu

SEQ ID NO: 817396 - RNA, 20 nt, Artificial Sequence
  Synthetic
auaaaccaugggaggggccu

SEQ ID NO: 817397 - RNA, 20 nt, Artificial Sequence
  Synthetic
acaguucugaaguggggccu

SEQ ID NO: 817398 - RNA, 20 nt, Artificial Sequence
  Synthetic
acaguuuugaaguggggccu

SEQ ID NO: 817399 - RNA, 20 nt, Artificial Sequence
  Synthetic
acauagggcuuuuggggccu

SEQ ID NO: 817400 - RNA, 20 nt, Artificial Sequence
  Synthetic
auauucacaucucugggccu

SEQ ID NO: 817401 - RNA, 20 nt, Artificial Sequence
  Synthetic
uuacaugugguguugggccu

SEQ ID NO: 817402 - RNA, 20 nt, Artificial Sequence
  Synthetic
uagcagaagcaaaauggccu

SEQ ID NO: 817403 - RNA, 20 nt, Artificial Sequence
  Synthetic
ucuuuacucugcccuggccu

SEQ ID NO: 817404 - RNA, 20 nt, Artificial Sequence
  Synthetic
ucuuuaaaaaugccuggccu

SEQ ID NO: 817405 - RNA, 20 nt, Artificial Sequence
  Synthetic
cuuuggcaaaaagcuggccu

SEQ ID NO: 817406 - RNA, 20 nt, Artificial Sequence
  Synthetic
uggauguuagccucuggccu

SEQ ID NO: 817407 - RNA, 20 nt, Artificial Sequence
  Synthetic
aauaugauguguauuggccu

SEQ ID NO: 817408 - RNA, 20 nt, Artificial Sequence
  Synthetic
aaccaucucaucuuuggccu

SEQ ID NO: 817409 - RNA, 20 nt, Artificial Sequence
  Synthetic
agaaucacuucuuuuggccu

SEQ ID NO: 817410 - RNA, 20 nt, Artificial Sequence
  Synthetic
ugcuuuuaagaaaaaugccu

SEQ ID NO: 817411 - RNA, 20 nt, Artificial Sequence
  Synthetic
cucaagagaauaaaaugccu

SEQ ID NO: 817412 - RNA, 20 nt, Artificial Sequence
  Synthetic
auuuuauguaacaaaugccu

SEQ ID NO: 817413 - RNA, 20 nt, Artificial Sequence
  Synthetic
uuuuguguuugcaaaugccu

SEQ ID NO: 817414 - RNA, 20 nt, Artificial Sequence
  Synthetic
uguccugaaugguaaugccu

SEQ ID NO: 817415 - RNA, 20 nt, Artificial Sequence
  Synthetic
ucaugcagauuuuaaugccu

SEQ ID NO: 817416 - RNA, 20 nt, Artificial Sequence
  Synthetic
cuagaacacaaaacaugccu

SEQ ID NO: 817417 - RNA, 20 nt, Artificial Sequence
  Synthetic
cuaccuuucuagacaugccu

SEQ ID NO: 817418 - RNA, 20 nt, Artificial Sequence
  Synthetic
uaaauauuauuuacaugccu

SEQ ID NO: 817419 - RNA, 20 nt, Artificial Sequence
  Synthetic
ccccaagucuguucaugccu

SEQ ID NO: 817420 - RNA, 20 nt, Artificial Sequence
  Synthetic
cugacuuuucucagaugccu

SEQ ID NO: 817421 - RNA, 20 nt, Artificial Sequence
  Synthetic
cuucuauacuguggaugccu

SEQ ID NO: 817422 - RNA, 20 nt, Artificial Sequence
  Synthetic
uacaagaccuucugaugccu

SEQ ID NO: 817423 - RNA, 20 nt, Artificial Sequence
  Synthetic
ugacaaguaauuugaugccu

SEQ ID NO: 817424 - RNA, 20 nt, Artificial Sequence
  Synthetic
aggaucauuuuuuuaugccu

SEQ ID NO: 817425 - RNA, 20 nt, Artificial Sequence
  Synthetic
uuucuccuauaaaacugccu

SEQ ID NO: 817426 - RNA, 20 nt, Artificial Sequence
  Synthetic
accucgugauccaacugccu

SEQ ID NO: 817427 - RNA, 20 nt, Artificial Sequence
  Synthetic
cugggaauaguucacugccu

SEQ ID NO: 817428 - RNA, 20 nt, Artificial Sequence
  Synthetic
caaugcucauaugacugccu

SEQ ID NO: 817429 - RNA, 20 nt, Artificial Sequence
  Synthetic
accucaugauccaccugccu

SEQ ID NO: 817430 - RNA, 20 nt, Artificial Sequence
  Synthetic
accucgugauccaccugccu

SEQ ID NO: 817431 - RNA, 20 nt, Artificial Sequence
  Synthetic
cucaggugauccaccugccu

SEQ ID NO: 817432 - RNA, 20 nt, Artificial Sequence
  Synthetic
accucaugauccgccugccu

SEQ ID NO: 817433 - RNA, 20 nt, Artificial Sequence
  Synthetic
accucgugauccgccugccu

SEQ ID NO: 817434 - RNA, 20 nt, Artificial Sequence
  Synthetic
cucaggugauccgccugccu

SEQ ID NO: 817435 - RNA, 20 nt, Artificial Sequence
  Synthetic
cucaaaugaucugccugccu

SEQ ID NO: 817436 - RNA, 20 nt, Artificial Sequence
  Synthetic
accuagugaucugccugccu

SEQ ID NO: 817437 - RNA, 20 nt, Artificial Sequence
  Synthetic
accucgugaucugccugccu

SEQ ID NO: 817438 - RNA, 20 nt, Artificial Sequence
  Synthetic
aucucgugaucugccugccu

SEQ ID NO: 817439 - RNA, 20 nt, Artificial Sequence
  Synthetic
cuaacacgauccuccugccu

SEQ ID NO: 817440 - RNA, 20 nt, Artificial Sequence
  Synthetic
cagcauuuuugguccugccu

SEQ ID NO: 817441 - RNA, 20 nt, Artificial Sequence
  Synthetic
caugguggccauagcugccu

SEQ ID NO: 817442 - RNA, 20 nt, Artificial Sequence
  Synthetic
cucaauggaaaaggcugccu

SEQ ID NO: 817443 - RNA, 20 nt, Artificial Sequence
  Synthetic
cucaggugaucaggcugccu

SEQ ID NO: 817444 - RNA, 20 nt, Artificial Sequence
  Synthetic
ucacugaaugagggcugccu

SEQ ID NO: 817445 - RNA, 20 nt, Artificial Sequence
  Synthetic
aggguuggguguugcugccu

SEQ ID NO: 817446 - RNA, 20 nt, Artificial Sequence
  Synthetic
uuccagccugccaucugccu

SEQ ID NO: 817447 - RNA, 20 nt, Artificial Sequence
  Synthetic
auacaauguucccucugccu

SEQ ID NO: 817448 - RNA, 20 nt, Artificial Sequence
  Synthetic
uccucaguucaugucugccu

SEQ ID NO: 817449 - RNA, 20 nt, Artificial Sequence
  Synthetic
aaggcaagucacuucugccu

SEQ ID NO: 817450 - RNA, 20 nt, Artificial Sequence
  Synthetic
accucgugauccuucugccu

SEQ ID NO: 817451 - RNA, 20 nt, Artificial Sequence
  Synthetic
cuauucaaccuuuucugccu

SEQ ID NO: 817452 - RNA, 20 nt, Artificial Sequence
  Synthetic
aaaaaucaauaaaagugccu

SEQ ID NO: 817453 - RNA, 20 nt, Artificial Sequence
  Synthetic
acaaagagaauaaagugccu

SEQ ID NO: 817454 - RNA, 20 nt, Artificial Sequence
  Synthetic
uauaucaucaaauagugccu

SEQ ID NO: 817455 - RNA, 20 nt, Artificial Sequence
  Synthetic
agccuacagagugcgugccu

SEQ ID NO: 817456 - RNA, 20 nt, Artificial Sequence
  Synthetic
caauguccuguauggugccu

SEQ ID NO: 817457 - RNA, 20 nt, Artificial Sequence
  Synthetic
cuuuuccauuugaugugccu

SEQ ID NO: 817458 - RNA, 20 nt, Artificial Sequence
  Synthetic
uccaugaacuuuaugugccu

SEQ ID NO: 817459 - RNA, 20 nt, Artificial Sequence
  Synthetic
uucaagugauucuugugccu

SEQ ID NO: 817460 - RNA, 20 nt, Artificial Sequence
  Synthetic
uuacugcugucuuugugccu

SEQ ID NO: 817461 - RNA, 20 nt, Artificial Sequence
  Synthetic
aauaaucgaguuuugugccu

SEQ ID NO: 817462 - RNA, 20 nt, Artificial Sequence
  Synthetic
uagagugugaccaauugccu

SEQ ID NO: 817463 - RNA, 20 nt, Artificial Sequence
  Synthetic
ugaguuaucaauaauugccu

SEQ ID NO: 817464 - RNA, 20 nt, Artificial Sequence
  Synthetic
aguugcccaugacauugccu

SEQ ID NO: 817465 - RNA, 20 nt, Artificial Sequence
  Synthetic
agacaauuuucccauugccu

SEQ ID NO: 817466 - RNA, 20 nt, Artificial Sequence
  Synthetic
aaguuugagaagcauugccu

SEQ ID NO: 817467 - RNA, 20 nt, Artificial Sequence
  Synthetic
cuuccuauucaagauugccu

SEQ ID NO: 817468 - RNA, 20 nt, Artificial Sequence
  Synthetic
cugaggugggaggauugccu

SEQ ID NO: 817469 - RNA, 20 nt, Artificial Sequence
  Synthetic
aguauuaaaugcuauugccu

SEQ ID NO: 817470 - RNA, 20 nt, Artificial Sequence
  Synthetic
uauccugaaugguauugccu

SEQ ID NO: 817471 - RNA, 20 nt, Artificial Sequence
  Synthetic
cguccugaaugguauugccu

SEQ ID NO: 817472 - RNA, 20 nt, Artificial Sequence
  Synthetic
uguccugaaugguauugccu

SEQ ID NO: 817473 - RNA, 20 nt, Artificial Sequence
  Synthetic
auuagucuacuuuauugccu

SEQ ID NO: 817474 - RNA, 20 nt, Artificial Sequence
  Synthetic
uucggugaaauaacuugccu

SEQ ID NO: 817475 - RNA, 20 nt, Artificial Sequence
  Synthetic
ucucauuugaaagcuugccu

SEQ ID NO: 817476 - RNA, 20 nt, Artificial Sequence
  Synthetic
cucaagcaauccucuugccu

SEQ ID NO: 817477 - RNA, 20 nt, Artificial Sequence
  Synthetic
ugggguuucaccaguugccu

SEQ ID NO: 817478 - RNA, 20 nt, Artificial Sequence
  Synthetic
agagucucacuauguugccu

SEQ ID NO: 817479 - RNA, 20 nt, Artificial Sequence
  Synthetic
agggucucacucuguugccu

SEQ ID NO: 817480 - RNA, 20 nt, Artificial Sequence
  Synthetic
aauguuuaaugaauuugccu

SEQ ID NO: 817481 - RNA, 20 nt, Artificial Sequence
  Synthetic
acagaugguggcauuugccu

SEQ ID NO: 817482 - RNA, 20 nt, Artificial Sequence
  Synthetic
cucuguggguguauuugccu

SEQ ID NO: 817483 - RNA, 20 nt, Artificial Sequence
  Synthetic
cucaggugauccguuugccu

SEQ ID NO: 817484 - RNA, 20 nt, Artificial Sequence
  Synthetic
ucuccccuacuuguuugccu

SEQ ID NO: 817485 - RNA, 20 nt, Artificial Sequence
  Synthetic
aguguacaaaaauuuugccu

SEQ ID NO: 817486 - RNA, 20 nt, Artificial Sequence
  Synthetic
aaaauaaaucaguuuugccu

SEQ ID NO: 817487 - RNA, 20 nt, Artificial Sequence
  Synthetic
uuuaccauuccaaaaauccu

SEQ ID NO: 817488 - RNA, 20 nt, Artificial Sequence
  Synthetic
uuuacuauuccaaaaauccu

SEQ ID NO: 817489 - RNA, 20 nt, Artificial Sequence
  Synthetic
aaaggcucuaaagaaauccu

SEQ ID NO: 817490 - RNA, 20 nt, Artificial Sequence
  Synthetic
cuuacagucagaacaauccu

SEQ ID NO: 817491 - RNA, 20 nt, Artificial Sequence
  Synthetic
uuuccccagcccccaauccu

SEQ ID NO: 817492 - RNA, 20 nt, Artificial Sequence
  Synthetic
uacuuauuauuaucaauccu

SEQ ID NO: 817493 - RNA, 20 nt, Artificial Sequence
  Synthetic
uccaugaaauucucaauccu

SEQ ID NO: 817494 - RNA, 20 nt, Artificial Sequence
  Synthetic
uguuguuuguauagaauccu

SEQ ID NO: 817495 - RNA, 20 nt, Artificial Sequence
  Synthetic
augguagauucuugaauccu

SEQ ID NO: 817496 - RNA, 20 nt, Artificial Sequence
  Synthetic
uaauacuuaaucauaauccu

SEQ ID NO: 817497 - RNA, 20 nt, Artificial Sequence
  Synthetic
cagcagucuuuucuaauccu

SEQ ID NO: 817498 - RNA, 20 nt, Artificial Sequence
  Synthetic
uucuucucaaaauuaauccu

SEQ ID NO: 817499 - RNA, 20 nt, Artificial Sequence
  Synthetic
ugauuuuucagaaacauccu

SEQ ID NO: 817500 - RNA, 20 nt, Artificial Sequence
  Synthetic
cuucuaagcuauaacauccu

SEQ ID NO: 817501 - RNA, 20 nt, Artificial Sequence
  Synthetic
agcuaauaggaacacauccu

SEQ ID NO: 817502 - RNA, 20 nt, Artificial Sequence
  Synthetic
acauuuuauguuaccauccu

SEQ ID NO: 817503 - RNA, 20 nt, Artificial Sequence
  Synthetic
ccacaguggugagccauccu

SEQ ID NO: 817504 - RNA, 20 nt, Artificial Sequence
  Synthetic
uauaugccaaccaucauccu

SEQ ID NO: 817505 - RNA, 20 nt, Artificial Sequence
  Synthetic
auccaccuuggacucauccu

SEQ ID NO: 817506 - RNA, 20 nt, Artificial Sequence
  Synthetic
acuuuuuuuuuccucauccu

SEQ ID NO: 817507 - RNA, 20 nt, Artificial Sequence
  Synthetic
cuuuuauugggucucauccu

SEQ ID NO: 817508 - RNA, 20 nt, Artificial Sequence
  Synthetic
uauuuuuuuuuuaagauccu

SEQ ID NO: 817509 - RNA, 20 nt, Artificial Sequence
  Synthetic
aagcggacgggacagauccu

SEQ ID NO: 817510 - RNA, 20 nt, Artificial Sequence
  Synthetic
uaauaguauucccagauccu

SEQ ID NO: 817511 - RNA, 20 nt, Artificial Sequence
  Synthetic
aauggugguuauuagauccu

SEQ ID NO: 817512 - RNA, 20 nt, Artificial Sequence
  Synthetic
agcaucauuuacuggauccu

SEQ ID NO: 817513 - RNA, 20 nt, Artificial Sequence
  Synthetic
agaugaaauuauaugauccu

SEQ ID NO: 817514 - RNA, 20 nt, Artificial Sequence
  Synthetic
aaggcucugguucugauccu

SEQ ID NO: 817515 - RNA, 20 nt, Artificial Sequence
  Synthetic
aauaaccaaacagugauccu

SEQ ID NO: 817516 - RNA, 20 nt, Artificial Sequence
  Synthetic
cagcagacugaggugauccu

SEQ ID NO: 817517 - RNA, 20 nt, Artificial Sequence
  Synthetic
acuacugguugugugauccu

SEQ ID NO: 817518 - RNA, 20 nt, Artificial Sequence
  Synthetic
ucuguauauacacauauccu

SEQ ID NO: 817519 - RNA, 20 nt, Artificial Sequence
  Synthetic
cagucucucccucauauccu

SEQ ID NO: 817520 - RNA, 20 nt, Artificial Sequence
  Synthetic
cuucucaaguuugauauccu

SEQ ID NO: 817521 - RNA, 20 nt, Artificial Sequence
  Synthetic
ugcuuguauacaacuauccu

SEQ ID NO: 817522 - RNA, 20 nt, Artificial Sequence
  Synthetic
uagauuuucauugguauccu

SEQ ID NO: 817523 - RNA, 20 nt, Artificial Sequence
  Synthetic
ccauuucucagauguauccu

SEQ ID NO: 817524 - RNA, 20 nt, Artificial Sequence
  Synthetic
uuacaagaacccuuuauccu

SEQ ID NO: 817525 - RNA, 20 nt, Artificial Sequence
  Synthetic
uuuccuggcagaaaacuccu

SEQ ID NO: 817526 - RNA, 20 nt, Artificial Sequence
  Synthetic
cacugcagccucaaacuccu

SEQ ID NO: 817527 - RNA, 20 nt, Artificial Sequence
  Synthetic
caggcuggucucaaacuccu

SEQ ID NO: 817528 - RNA, 20 nt, Artificial Sequence
  Synthetic
accuucccuuucaaacuccu

SEQ ID NO: 817529 - RNA, 20 nt, Artificial Sequence
  Synthetic
cacugcagccaccaacuccu

SEQ ID NO: 817530 - RNA, 20 nt, Artificial Sequence
  Synthetic
caggcugguauccaacuccu

SEQ ID NO: 817531 - RNA, 20 nt, Artificial Sequence
  Synthetic
cacuguaaccuccaacuccu

SEQ ID NO: 817532 - RNA, 20 nt, Artificial Sequence
  Synthetic
cugguauuauaagaacuccu

SEQ ID NO: 817533 - RNA, 20 nt, Artificial Sequence
  Synthetic
acaggaagaagcgaacuccu

SEQ ID NO: 817534 - RNA, 20 nt, Artificial Sequence
  Synthetic
cacugcagccucgaacuccu

SEQ ID NO: 817535 - RNA, 20 nt, Artificial Sequence
  Synthetic
caggcuggccucgaacuccu

SEQ ID NO: 817536 - RNA, 20 nt, Artificial Sequence
  Synthetic
cagacuggucucgaacuccu

SEQ ID NO: 817537 - RNA, 20 nt, Artificial Sequence
  Synthetic
cagccuugaacugaacuccu

SEQ ID NO: 817538 - RNA, 20 nt, Artificial Sequence
  Synthetic
cacugcagccuugaacuccu

SEQ ID NO: 817539 - RNA, 20 nt, Artificial Sequence
  Synthetic
caggcugguuuugaacuccu

SEQ ID NO: 817540 - RNA, 20 nt, Artificial Sequence
  Synthetic
uacuauuaauuuuaacuccu

SEQ ID NO: 817541 - RNA, 20 nt, Artificial Sequence
  Synthetic
uugaaguccuccccacuccu

SEQ ID NO: 817542 - RNA, 20 nt, Artificial Sequence
  Synthetic
acuggcugugguccacuccu

SEQ ID NO: 817543 - RNA, 20 nt, Artificial Sequence
  Synthetic
cugccacucuggucacuccu

SEQ ID NO: 817544 - RNA, 20 nt, Artificial Sequence
  Synthetic
auuuuccuggguucacuccu

SEQ ID NO: 817545 - RNA, 20 nt, Artificial Sequence
  Synthetic
caggcuggucuuggacuccu

SEQ ID NO: 817546 - RNA, 20 nt, Artificial Sequence
  Synthetic
cauauagaauugcuacuccu

SEQ ID NO: 817547 - RNA, 20 nt, Artificial Sequence
  Synthetic
cuaagaaugcccaaccuccu

SEQ ID NO: 817548 - RNA, 20 nt, Artificial Sequence
  Synthetic
cucggcucgcugaaccuccu

SEQ ID NO: 817549 - RNA, 20 nt, Artificial Sequence
  Synthetic
auuugauuuucuaaccuccu

SEQ ID NO: 817550 - RNA, 20 nt, Artificial Sequence
  Synthetic
aagauaaauucccaccuccu

SEQ ID NO: 817551 - RNA, 20 nt, Artificial Sequence
  Synthetic
cacagcaaccuccaccuccu

SEQ ID NO: 817552 - RNA, 20 nt, Artificial Sequence
  Synthetic
caccgcaaccuccaccuccu

SEQ ID NO: 817553 - RNA, 20 nt, Artificial Sequence
  Synthetic
cacugcaaccuccaccuccu

SEQ ID NO: 817554 - RNA, 20 nt, Artificial Sequence
  Synthetic
caccgcaagcuccaccuccu

SEQ ID NO: 817555 - RNA, 20 nt, Artificial Sequence
  Synthetic
cacugcaagcuccaccuccu

SEQ ID NO: 817556 - RNA, 20 nt, Artificial Sequence
  Synthetic
acacuuuacuagcaccuccu

SEQ ID NO: 817557 - RNA, 20 nt, Artificial Sequence
  Synthetic
auacauguaagucaccuccu

SEQ ID NO: 817558 - RNA, 20 nt, Artificial Sequence
  Synthetic
uacugccgccuugaccuccu

SEQ ID NO: 817559 - RNA, 20 nt, Artificial Sequence
  Synthetic
cacugcaacuucuaccuccu

SEQ ID NO: 817560 - RNA, 20 nt, Artificial Sequence
  Synthetic
cucauuagugguccccuccu

SEQ ID NO: 817561 - RNA, 20 nt, Artificial Sequence
  Synthetic
aucuuucauaaugcccuccu

SEQ ID NO: 817562 - RNA, 20 nt, Artificial Sequence
  Synthetic
cucaaguggccugcccuccu

SEQ ID NO: 817563 - RNA, 20 nt, Artificial Sequence
  Synthetic
cacugcaaccucucccuccu

SEQ ID NO: 817564 - RNA, 20 nt, Artificial Sequence
  Synthetic
ccauuucaucuuucccuccu

SEQ ID NO: 817565 - RNA, 20 nt, Artificial Sequence
  Synthetic
uucugguaccucagccuccu

SEQ ID NO: 817566 - RNA, 20 nt, Artificial Sequence
  Synthetic
cacagcaaccuccgccuccu

SEQ ID NO: 817567 - RNA, 20 nt, Artificial Sequence
  Synthetic
cacugcaaccuccgccuccu

SEQ ID NO: 817568 - RNA, 20 nt, Artificial Sequence
  Synthetic
cgcugcaaccuccgccuccu

SEQ ID NO: 817569 - RNA, 20 nt, Artificial Sequence
  Synthetic
cacugcagccuccgccuccu

SEQ ID NO: 817570 - RNA, 20 nt, Artificial Sequence
  Synthetic
cacugcaagcuccgccuccu

SEQ ID NO: 817571 - RNA, 20 nt, Artificial Sequence
  Synthetic
ucuucugccuuaugccuccu

SEQ ID NO: 817572 - RNA, 20 nt, Artificial Sequence
  Synthetic
cacagcaaccucugccuccu

SEQ ID NO: 817573 - RNA, 20 nt, Artificial Sequence
  Synthetic
cacugcaaccucugccuccu

SEQ ID NO: 817574 - RNA, 20 nt, Artificial Sequence
  Synthetic
uacugcaaccucugccuccu

SEQ ID NO: 817575 - RNA, 20 nt, Artificial Sequence
  Synthetic
cacugcagccucugccuccu

SEQ ID NO: 817576 - RNA, 20 nt, Artificial Sequence
  Synthetic
ugcacagaggggugccuccu

SEQ ID NO: 817577 - RNA, 20 nt, Artificial Sequence
  Synthetic
cacugcaaccuuugccuccu

SEQ ID NO: 817578 - RNA, 20 nt, Artificial Sequence
  Synthetic
cagacuucagagauccuccu

SEQ ID NO: 817579 - RNA, 20 nt, Artificial Sequence
  Synthetic
aaucaaaacuuuauccuccu

SEQ ID NO: 817580 - RNA, 20 nt, Artificial Sequence
  Synthetic
ucugguuucgcucuccuccu

SEQ ID NO: 817581 - RNA, 20 nt, Artificial Sequence
  Synthetic
ugcuauggaaaagagcuccu

SEQ ID NO: 817582 - RNA, 20 nt, Artificial Sequence
  Synthetic
auaucuagauaauagcuccu

SEQ ID NO: 817583 - RNA, 20 nt, Artificial Sequence
  Synthetic
ugauacauuuagaggcuccu

SEQ ID NO: 817584 - RNA, 20 nt, Artificial Sequence
  Synthetic
cacaaaaucugugggcuccu

SEQ ID NO: 817585 - RNA, 20 nt, Artificial Sequence
  Synthetic
agcaaguuaaaauggcuccu

SEQ ID NO: 817586 - RNA, 20 nt, Artificial Sequence
  Synthetic
cuuuugauuuuauggcuccu

SEQ ID NO: 817587 - RNA, 20 nt, Artificial Sequence
  Synthetic
caggcauuugcuuggcuccu

SEQ ID NO: 817588 - RNA, 20 nt, Artificial Sequence
  Synthetic
ugauauagccuaaugcuccu

SEQ ID NO: 817589 - RNA, 20 nt, Artificial Sequence
  Synthetic
acccuacauuuaaugcuccu

SEQ ID NO: 817590 - RNA, 20 nt, Artificial Sequence
  Synthetic
cugacuccuacacugcuccu

SEQ ID NO: 817591 - RNA, 20 nt, Artificial Sequence
  Synthetic
ugguacagcauauugcuccu

SEQ ID NO: 817592 - RNA, 20 nt, Artificial Sequence
  Synthetic
ugguauagccuauugcuccu

SEQ ID NO: 817593 - RNA, 20 nt, Artificial Sequence
  Synthetic
uaggcuggucucaaucuccu

SEQ ID NO: 817594 - RNA, 20 nt, Artificial Sequence
  Synthetic
ccccuccaucagaaucuccu

SEQ ID NO: 817595 - RNA, 20 nt, Artificial Sequence
  Synthetic
uaauuuguugaacaucuccu

SEQ ID NO: 817596 - RNA, 20 nt, Artificial Sequence
  Synthetic
uuaaacugcucacaucuccu

SEQ ID NO: 817597 - RNA, 20 nt, Artificial Sequence
  Synthetic
cacugcaacuuccaucuccu

SEQ ID NO: 817598 - RNA, 20 nt, Artificial Sequence
  Synthetic
ugcagcccagcucaucuccu

SEQ ID NO: 817599 - RNA, 20 nt, Artificial Sequence
  Synthetic
uuuaggcuuuuucaucuccu

SEQ ID NO: 817600 - RNA, 20 nt, Artificial Sequence
  Synthetic
aucaaauggcucccucuccu

SEQ ID NO: 817601 - RNA, 20 nt, Artificial Sequence
  Synthetic
ccuaccucucuuccucuccu

SEQ ID NO: 817602 - RNA, 20 nt, Artificial Sequence
  Synthetic
cucaucucucuuccucuccu

SEQ ID NO: 817603 - RNA, 20 nt, Artificial Sequence
  Synthetic
ugcuauaagcccucucuccu

SEQ ID NO: 817604 - RNA, 20 nt, Artificial Sequence
  Synthetic
uaaugauuaucuucucuccu

SEQ ID NO: 817605 - RNA, 20 nt, Artificial Sequence
  Synthetic
aucagaaaggccagucuccu

SEQ ID NO: 817606 - RNA, 20 nt, Artificial Sequence
  Synthetic
uuuugaucugucagucuccu

SEQ ID NO: 817607 - RNA, 20 nt, Artificial Sequence
  Synthetic
auuuuaaaauugagucuccu

SEQ ID NO: 817608 - RNA, 20 nt, Artificial Sequence
  Synthetic
agaugucuauuaggucuccu

SEQ ID NO: 817609 - RNA, 20 nt, Artificial Sequence
  Synthetic
auuuugagacagggucuccu

SEQ ID NO: 817610 - RNA, 20 nt, Artificial Sequence
  Synthetic
cacugcaaccucugucuccu

SEQ ID NO: 817611 - RNA, 20 nt, Artificial Sequence
  Synthetic
cucccuuuucauauucuccu

SEQ ID NO: 817612 - RNA, 20 nt, Artificial Sequence
  Synthetic
auauuuauucuacuucuccu

SEQ ID NO: 817613 - RNA, 20 nt, Artificial Sequence
  Synthetic
aagcuaucuugcuuucuccu

SEQ ID NO: 817614 - RNA, 20 nt, Artificial Sequence
  Synthetic
accuuuuaaauguuucuccu

SEQ ID NO: 817615 - RNA, 20 nt, Artificial Sequence
  Synthetic
cuucagcucucuuuucuccu

SEQ ID NO: 817616 - RNA, 20 nt, Artificial Sequence
  Synthetic
cuuugguaaauaaaaguccu

SEQ ID NO: 817617 - RNA, 20 nt, Artificial Sequence
  Synthetic
ccuuggacucccaaaguccu

SEQ ID NO: 817618 - RNA, 20 nt, Artificial Sequence
  Synthetic
ccucggccucccaaaguccu

SEQ ID NO: 817619 - RNA, 20 nt, Artificial Sequence
  Synthetic
ccuuggccucccaaaguccu

SEQ ID NO: 817620 - RNA, 20 nt, Artificial Sequence
  Synthetic
cuuuggccucccaaaguccu

SEQ ID NO: 817621 - RNA, 20 nt, Artificial Sequence
  Synthetic
aaaaucuggggggaaguccu

SEQ ID NO: 817622 - RNA, 20 nt, Artificial Sequence
  Synthetic
cagcauuuuauaacaguccu

SEQ ID NO: 817623 - RNA, 20 nt, Artificial Sequence
  Synthetic
aacauccauucugcaguccu

SEQ ID NO: 817624 - RNA, 20 nt, Artificial Sequence
  Synthetic
auugugcauuaaucaguccu

SEQ ID NO: 817625 - RNA, 20 nt, Artificial Sequence
  Synthetic
augccucagugcucaguccu

SEQ ID NO: 817626 - RNA, 20 nt, Artificial Sequence
  Synthetic
ugagaauaaagaagaguccu

SEQ ID NO: 817627 - RNA, 20 nt, Artificial Sequence
  Synthetic
ccauaacccccacacguccu

SEQ ID NO: 817628 - RNA, 20 nt, Artificial Sequence
  Synthetic
ugaguaaaugucaagguccu

SEQ ID NO: 817629 - RNA, 20 nt, Artificial Sequence
  Synthetic
cuugaacaucuugagguccu

SEQ ID NO: 817630 - RNA, 20 nt, Artificial Sequence
  Synthetic
uacguguugugcuggguccu

SEQ ID NO: 817631 - RNA, 20 nt, Artificial Sequence
  Synthetic
acuagagaguuaaugguccu

SEQ ID NO: 817632 - RNA, 20 nt, Artificial Sequence
  Synthetic
acaaucuggggccugguccu

SEQ ID NO: 817633 - RNA, 20 nt, Artificial Sequence
  Synthetic
cugugaauccgucugguccu

SEQ ID NO: 817634 - RNA, 20 nt, Artificial Sequence
  Synthetic
cagugaugacauuugguccu

SEQ ID NO: 817635 - RNA, 20 nt, Artificial Sequence
  Synthetic
cuccuacugcauuugguccu

SEQ ID NO: 817636 - RNA, 20 nt, Artificial Sequence
  Synthetic
aaaaugcacaaaaauguccu

SEQ ID NO: 817637 - RNA, 20 nt, Artificial Sequence
  Synthetic
acccuauaugugaauguccu

SEQ ID NO: 817638 - RNA, 20 nt, Artificial Sequence
  Synthetic
cugaaauguuauaauguccu

SEQ ID NO: 817639 - RNA, 20 nt, Artificial Sequence
  Synthetic
aaaggaugaguucauguccu

SEQ ID NO: 817640 - RNA, 20 nt, Artificial Sequence
  Synthetic
caucugccuacugauguccu

SEQ ID NO: 817641 - RNA, 20 nt, Artificial Sequence
  Synthetic
ugaagggaaaaauauguccu

SEQ ID NO: 817642 - RNA, 20 nt, Artificial Sequence
  Synthetic
agaaaauaauugucuguccu

SEQ ID NO: 817643 - RNA, 20 nt, Artificial Sequence
  Synthetic
ccuuuaaacuucaguguccu

SEQ ID NO: 817644 - RNA, 20 nt, Artificial Sequence
  Synthetic
acuggaagaagaauuguccu

SEQ ID NO: 817645 - RNA, 20 nt, Artificial Sequence
  Synthetic
uuucuuucuauucuuguccu

SEQ ID NO: 817646 - RNA, 20 nt, Artificial Sequence
  Synthetic
aacaacccaccauuuguccu

SEQ ID NO: 817647 - RNA, 20 nt, Artificial Sequence
  Synthetic
auauuugcauacaaauuccu

SEQ ID NO: 817648 - RNA, 20 nt, Artificial Sequence
  Synthetic
aaucuacaaaauaaauuccu

SEQ ID NO: 817649 - RNA, 20 nt, Artificial Sequence
  Synthetic
aaauugcaguagcaauuccu

SEQ ID NO: 817650 - RNA, 20 nt, Artificial Sequence
  Synthetic
cagagcugaguucaauuccu

SEQ ID NO: 817651 - RNA, 20 nt, Artificial Sequence
  Synthetic
uaaugguuaaacgaauuccu

SEQ ID NO: 817652 - RNA, 20 nt, Artificial Sequence
  Synthetic
cguggcagccuugaauuccu

SEQ ID NO: 817653 - RNA, 20 nt, Artificial Sequence
  Synthetic
uccaagcagauuuaauuccu

SEQ ID NO: 817654 - RNA, 20 nt, Artificial Sequence
  Synthetic
agaugccaugaaacauuccu

SEQ ID NO: 817655 - RNA, 20 nt, Artificial Sequence
  Synthetic
cacagcaccagcacauuccu

SEQ ID NO: 817656 - RNA, 20 nt, Artificial Sequence
  Synthetic
ucugacaaaaucacauuccu

SEQ ID NO: 817657 - RNA, 20 nt, Artificial Sequence
  Synthetic
aagucuuagaguacauuccu

SEQ ID NO: 817658 - RNA, 20 nt, Artificial Sequence
  Synthetic
cauucagaaagggcauuccu

SEQ ID NO: 817659 - RNA, 20 nt, Artificial Sequence
  Synthetic
cccuuguaaguugcauuccu

SEQ ID NO: 817660 - RNA, 20 nt, Artificial Sequence
  Synthetic
ucauuucuauucucauuccu

SEQ ID NO: 817661 - RNA, 20 nt, Artificial Sequence
  Synthetic
cacauccacuguucauuccu

SEQ ID NO: 817662 - RNA, 20 nt, Artificial Sequence
  Synthetic
uaagcuggucucagauuccu

SEQ ID NO: 817663 - RNA, 20 nt, Artificial Sequence
  Synthetic
uaucacuuugaaggauuccu

SEQ ID NO: 817664 - RNA, 20 nt, Artificial Sequence
  Synthetic
cccuuguaaguuggauuccu

SEQ ID NO: 817665 - RNA, 20 nt, Artificial Sequence
  Synthetic
cgcuuguaaguuggauuccu

SEQ ID NO: 817666 - RNA, 20 nt, Artificial Sequence
  Synthetic
agaugccuaaccugauuccu

SEQ ID NO: 817667 - RNA, 20 nt, Artificial Sequence
  Synthetic
caauaacagcuaauauuccu

SEQ ID NO: 817668 - RNA, 20 nt, Artificial Sequence
  Synthetic
agaaucaaauccauauuccu

SEQ ID NO: 817669 - RNA, 20 nt, Artificial Sequence
  Synthetic
aaguacacaaguauauuccu

SEQ ID NO: 817670 - RNA, 20 nt, Artificial Sequence
  Synthetic
cucuuugcuucucuauuccu

SEQ ID NO: 817671 - RNA, 20 nt, Artificial Sequence
  Synthetic
cccuugcaaguuguauuccu

SEQ ID NO: 817672 - RNA, 20 nt, Artificial Sequence
  Synthetic
cccuucuaaguuguauuccu

SEQ ID NO: 817673 - RNA, 20 nt, Artificial Sequence
  Synthetic
cccuuguaaguuguauuccu

SEQ ID NO: 817674 - RNA, 20 nt, Artificial Sequence
  Synthetic
aaaaauguguuauuauuccu

SEQ ID NO: 817675 - RNA, 20 nt, Artificial Sequence
  Synthetic
uaauauuauuuauuauuccu

SEQ ID NO: 817676 - RNA, 20 nt, Artificial Sequence
  Synthetic
auggacaagcaaaacuuccu

SEQ ID NO: 817677 - RNA, 20 nt, Artificial Sequence
  Synthetic
cuauuuguugagcacuuccu

SEQ ID NO: 817678 - RNA, 20 nt, Artificial Sequence
  Synthetic
aaguauugcauucacuuccu

SEQ ID NO: 817679 - RNA, 20 nt, Artificial Sequence
  Synthetic
cacugcagccucgacuuccu

SEQ ID NO: 817680 - RNA, 20 nt, Artificial Sequence
  Synthetic
aguuuucuucaugacuuccu

SEQ ID NO: 817681 - RNA, 20 nt, Artificial Sequence
  Synthetic
aauacagcccuugacuuccu

SEQ ID NO: 817682 - RNA, 20 nt, Artificial Sequence
  Synthetic
cgguuugcuguauacuuccu

SEQ ID NO: 817683 - RNA, 20 nt, Artificial Sequence
  Synthetic
cucuccuacugguacuuccu

SEQ ID NO: 817684 - RNA, 20 nt, Artificial Sequence
  Synthetic
ugggauauggguuacuuccu

SEQ ID NO: 817685 - RNA, 20 nt, Artificial Sequence
  Synthetic
aacaucucuugcaccuuccu

SEQ ID NO: 817686 - RNA, 20 nt, Artificial Sequence
  Synthetic
uuccagacaucacccuuccu

SEQ ID NO: 817687 - RNA, 20 nt, Artificial Sequence
  Synthetic
uucuagauaucacccuuccu

SEQ ID NO: 817688 - RNA, 20 nt, Artificial Sequence
  Synthetic
aauggcuuaaugcccuuccu

SEQ ID NO: 817689 - RNA, 20 nt, Artificial Sequence
  Synthetic
cuaaggcagagagccuuccu

SEQ ID NO: 817690 - RNA, 20 nt, Artificial Sequence
  Synthetic
cucaagcaguccuccuuccu

SEQ ID NO: 817691 - RNA, 20 nt, Artificial Sequence
  Synthetic
cucaagcaauucuccuuccu

SEQ ID NO: 817692 - RNA, 20 nt, Artificial Sequence
  Synthetic
uaauauagcccuuccuuccu

SEQ ID NO: 817693 - RNA, 20 nt, Artificial Sequence
  Synthetic
cccuccuaccucagcuuccu

SEQ ID NO: 817694 - RNA, 20 nt, Artificial Sequence
  Synthetic
cacugcaaccuccgcuuccu

SEQ ID NO: 817695 - RNA, 20 nt, Artificial Sequence
  Synthetic
cagcugagguaaggcuuccu

SEQ ID NO: 817696 - RNA, 20 nt, Artificial Sequence
  Synthetic
uguccucagagaugcuuccu

SEQ ID NO: 817697 - RNA, 20 nt, Artificial Sequence
  Synthetic
agcaauuuuaugaucuuccu

SEQ ID NO: 817698 - RNA, 20 nt, Artificial Sequence
  Synthetic
uucuuugaagcccucuuccu

SEQ ID NO: 817699 - RNA, 20 nt, Artificial Sequence
  Synthetic
cuagaaguuguccucuuccu

SEQ ID NO: 817700 - RNA, 20 nt, Artificial Sequence
  Synthetic
ccaaaucuguuccucuuccu

SEQ ID NO: 817701 - RNA, 20 nt, Artificial Sequence
  Synthetic
cuccuucugguucucuuccu

SEQ ID NO: 817702 - RNA, 20 nt, Artificial Sequence
  Synthetic
agauccugcuuucucuuccu

SEQ ID NO: 817703 - RNA, 20 nt, Artificial Sequence
  Synthetic
agaauuuaaauuuucuuccu

SEQ ID NO: 817704 - RNA, 20 nt, Artificial Sequence
  Synthetic
ugcaucucugaaaaguuccu

SEQ ID NO: 817705 - RNA, 20 nt, Artificial Sequence
  Synthetic
auagagggggagaaguuccu

SEQ ID NO: 817706 - RNA, 20 nt, Artificial Sequence
  Synthetic
cacugcuuccuccaguuccu

SEQ ID NO: 817707 - RNA, 20 nt, Artificial Sequence
  Synthetic
accaaggucccagaguuccu

SEQ ID NO: 817708 - RNA, 20 nt, Artificial Sequence
  Synthetic
augguugacauugaguuccu

SEQ ID NO: 817709 - RNA, 20 nt, Artificial Sequence
  Synthetic
uaacauauucacagguuccu

SEQ ID NO: 817710 - RNA, 20 nt, Artificial Sequence
  Synthetic
ccaugcauucaaauguuccu

SEQ ID NO: 817711 - RNA, 20 nt, Artificial Sequence
  Synthetic
aucacuuccuccauguuccu

SEQ ID NO: 817712 - RNA, 20 nt, Artificial Sequence
  Synthetic
cugugaauccaucuguuccu

SEQ ID NO: 817713 - RNA, 20 nt, Artificial Sequence
  Synthetic
uuuguaaaagcucuguuccu

SEQ ID NO: 817714 - RNA, 20 nt, Artificial Sequence
  Synthetic
aggagagacagauuguuccu

SEQ ID NO: 817715 - RNA, 20 nt, Artificial Sequence
  Synthetic
auugaaucuauaaauuuccu

SEQ ID NO: 817716 - RNA, 20 nt, Artificial Sequence
  Synthetic
uccaaaugacagaauuuccu

SEQ ID NO: 817717 - RNA, 20 nt, Artificial Sequence
  Synthetic
uauauuaaaaauaauuuccu

SEQ ID NO: 817718 - RNA, 20 nt, Artificial Sequence
  Synthetic
uaaauuauaauuaauuuccu

SEQ ID NO: 817719 - RNA, 20 nt, Artificial Sequence
  Synthetic
acaaauuuuauuaauuuccu

SEQ ID NO: 817720 - RNA, 20 nt, Artificial Sequence
  Synthetic
aggguuggucuuaauuuccu

SEQ ID NO: 817721 - RNA, 20 nt, Artificial Sequence
  Synthetic
uacagucuaccagauuuccu

SEQ ID NO: 817722 - RNA, 20 nt, Artificial Sequence
  Synthetic
auaauuggaaaauauuuccu

SEQ ID NO: 817723 - RNA, 20 nt, Artificial Sequence
  Synthetic
agaaguucauucuauuuccu

SEQ ID NO: 817724 - RNA, 20 nt, Artificial Sequence
  Synthetic
uguccagaauaguauuuccu

SEQ ID NO: 817725 - RNA, 20 nt, Artificial Sequence
  Synthetic
aggucuucagcaccuuuccu

SEQ ID NO: 817726 - RNA, 20 nt, Artificial Sequence
  Synthetic
uacauagauacuccuuuccu

SEQ ID NO: 817727 - RNA, 20 nt, Artificial Sequence
  Synthetic
acuacaucauuggcuuuccu

SEQ ID NO: 817728 - RNA, 20 nt, Artificial Sequence
  Synthetic
uuuugcuuaagugcuuuccu

SEQ ID NO: 817729 - RNA, 20 nt, Artificial Sequence
  Synthetic
cuuauuucuacuucuuuccu

SEQ ID NO: 817730 - RNA, 20 nt, Artificial Sequence
  Synthetic
aaucuucucucuucuuuccu

SEQ ID NO: 817731 - RNA, 20 nt, Artificial Sequence
  Synthetic
acaauuucuagaaguuuccu

SEQ ID NO: 817732 - RNA, 20 nt, Artificial Sequence
  Synthetic
acauuuauauucaguuuccu

SEQ ID NO: 817733 - RNA, 20 nt, Artificial Sequence
  Synthetic
aacugcuauuucaguuuccu

SEQ ID NO: 817734 - RNA, 20 nt, Artificial Sequence
  Synthetic
cucuucuguauucguuuccu

SEQ ID NO: 817735 - RNA, 20 nt, Artificial Sequence
  Synthetic
aggcuguaucaugguuuccu

SEQ ID NO: 817736 - RNA, 20 nt, Artificial Sequence
  Synthetic
uaaaauacccuugguuuccu

SEQ ID NO: 817737 - RNA, 20 nt, Artificial Sequence
  Synthetic
cucccacagcacuguuuccu

SEQ ID NO: 817738 - RNA, 20 nt, Artificial Sequence
  Synthetic
uguucccuacaguguuuccu

SEQ ID NO: 817739 - RNA, 20 nt, Artificial Sequence
  Synthetic
uguccagagugguguuuccu

SEQ ID NO: 817740 - RNA, 20 nt, Artificial Sequence
  Synthetic
uuguauguauuuuguuuccu

SEQ ID NO: 817741 - RNA, 20 nt, Artificial Sequence
  Synthetic
uuuucauuuggaauuuuccu

SEQ ID NO: 817742 - RNA, 20 nt, Artificial Sequence
  Synthetic
cuacuucuaugaauuuuccu

SEQ ID NO: 817743 - RNA, 20 nt, Artificial Sequence
  Synthetic
aaaaaguaaaacauuuuccu

SEQ ID NO: 817744 - RNA, 20 nt, Artificial Sequence
  Synthetic
ugaaacuuugccauuuuccu

SEQ ID NO: 817745 - RNA, 20 nt, Artificial Sequence
  Synthetic
ucuuuguggcuacuuuuccu

SEQ ID NO: 817746 - RNA, 20 nt, Artificial Sequence
  Synthetic
ucuuuugaagcccuuuuccu

SEQ ID NO: 817747 - RNA, 20 nt, Artificial Sequence
  Synthetic
aaugguacccugcuuuuccu

SEQ ID NO: 817748 - RNA, 20 nt, Artificial Sequence
  Synthetic
ccucacucauuucuuuuccu

SEQ ID NO: 817749 - RNA, 20 nt, Artificial Sequence
  Synthetic
ccuuugaauauaguuuuccu

SEQ ID NO: 817750 - RNA, 20 nt, Artificial Sequence
  Synthetic
cuaguauucuguguuuuccu

SEQ ID NO: 817751 - RNA, 20 nt, Artificial Sequence
  Synthetic
uuucugaaagaauuuuuccu

SEQ ID NO: 817752 - RNA, 20 nt, Artificial Sequence
  Synthetic
uuggauuuguuauuuuuccu

SEQ ID NO: 817753 - RNA, 20 nt, Artificial Sequence
  Synthetic
uguaaaccuaccuuuuuccu

SEQ ID NO: 817754 - RNA, 20 nt, Artificial Sequence
  Synthetic
ccaugaugugucuuuuuccu

SEQ ID NO: 817755 - RNA, 20 nt, Artificial Sequence
  Synthetic
auaauacuauuguuuuuccu

SEQ ID NO: 817756 - RNA, 20 nt, Artificial Sequence
  Synthetic
uauguccaagauuuuuuccu

SEQ ID NO: 817757 - RNA, 20 nt, Artificial Sequence
  Synthetic
ccuggcagagaaaaaaagcu

SEQ ID NO: 817758 - RNA, 20 nt, Artificial Sequence
  Synthetic
auucuaacucccaaaaagcu

SEQ ID NO: 817759 - RNA, 20 nt, Artificial Sequence
  Synthetic
uuguuugcucucaaaaagcu

SEQ ID NO: 817760 - RNA, 20 nt, Artificial Sequence
  Synthetic
accaggcagcugaaaaagcu

SEQ ID NO: 817761 - RNA, 20 nt, Artificial Sequence
  Synthetic
uagaggcagaauaaaaagcu

SEQ ID NO: 817762 - RNA, 20 nt, Artificial Sequence
  Synthetic
uuaaccaauggacaaaagcu

SEQ ID NO: 817763 - RNA, 20 nt, Artificial Sequence
  Synthetic
ucauuuguccuccaaaagcu

SEQ ID NO: 817764 - RNA, 20 nt, Artificial Sequence
  Synthetic
uucgggucaaugcaaaagcu

SEQ ID NO: 817765 - RNA, 20 nt, Artificial Sequence
  Synthetic
ucucccaguaaagaaaagcu

SEQ ID NO: 817766 - RNA, 20 nt, Artificial Sequence
  Synthetic
aacuagugcuaugaaaagcu

SEQ ID NO: 817767 - RNA, 20 nt, Artificial Sequence
  Synthetic
uugcaaaauaauacaaagcu

SEQ ID NO: 817768 - RNA, 20 nt, Artificial Sequence
  Synthetic
uuguaaccuuguacaaagcu

SEQ ID NO: 817769 - RNA, 20 nt, Artificial Sequence
  Synthetic
acguggcaguugccaaagcu

SEQ ID NO: 817770 - RNA, 20 nt, Artificial Sequence
  Synthetic
agacaguuuuaaucaaagcu

SEQ ID NO: 817771 - RNA, 20 nt, Artificial Sequence
  Synthetic
auuaauaugauaucaaagcu

SEQ ID NO: 817772 - RNA, 20 nt, Artificial Sequence
  Synthetic
cauugucuggguucaaagcu

SEQ ID NO: 817773 - RNA, 20 nt, Artificial Sequence
  Synthetic
aauuauacuucaauaaagcu

SEQ ID NO: 817774 - RNA, 20 nt, Artificial Sequence
  Synthetic
uacuauuguuuuauaaagcu

SEQ ID NO: 817775 - RNA, 20 nt, Artificial Sequence
  Synthetic
uguuuguuaugacuaaagcu

SEQ ID NO: 817776 - RNA, 20 nt, Artificial Sequence
  Synthetic
ugacaaaaguagaacaagcu

SEQ ID NO: 817777 - RNA, 20 nt, Artificial Sequence
  Synthetic
ugugaaaugguaaccaagcu

SEQ ID NO: 817778 - RNA, 20 nt, Artificial Sequence
  Synthetic
uauugcuuacaugccaagcu

SEQ ID NO: 817779 - RNA, 20 nt, Artificial Sequence
  Synthetic
uagauuguaaaagucaagcu

SEQ ID NO: 817780 - RNA, 20 nt, Artificial Sequence
  Synthetic
auugggcagaaggagaagcu

SEQ ID NO: 817781 - RNA, 20 nt, Artificial Sequence
  Synthetic
ugcuaucauugggagaagcu

SEQ ID NO: 817782 - RNA, 20 nt, Artificial Sequence
  Synthetic
caaaaagauuccuagaagcu

SEQ ID NO: 817783 - RNA, 20 nt, Artificial Sequence
  Synthetic
ucaaguugagaagggaagcu

SEQ ID NO: 817784 - RNA, 20 nt, Artificial Sequence
  Synthetic
acuuaacuuucagggaagcu

SEQ ID NO: 817785 - RNA, 20 nt, Artificial Sequence
  Synthetic
ucccagcacuuugggaagcu

SEQ ID NO: 817786 - RNA, 20 nt, Artificial Sequence
  Synthetic
ugcagagcaggcuggaagcu

SEQ ID NO: 817787 - RNA, 20 nt, Artificial Sequence
  Synthetic
cucucacaaaucuggaagcu

SEQ ID NO: 817788 - RNA, 20 nt, Artificial Sequence
  Synthetic
cugaguucugauuggaagcu

SEQ ID NO: 817789 - RNA, 20 nt, Artificial Sequence
  Synthetic
aaagcuaagacuuggaagcu

SEQ ID NO: 817790 - RNA, 20 nt, Artificial Sequence
  Synthetic
aaucuucuagaaaugaagcu

SEQ ID NO: 817791 - RNA, 20 nt, Artificial Sequence
  Synthetic
uucauugggaguaugaagcu

SEQ ID NO: 817792 - RNA, 20 nt, Artificial Sequence
  Synthetic
aauuacugaaaaaauaagcu

SEQ ID NO: 817793 - RNA, 20 nt, Artificial Sequence
  Synthetic
auucuuacauugcauaagcu

SEQ ID NO: 817794 - RNA, 20 nt, Artificial Sequence
  Synthetic
ccauuuccuaauuauaagcu

SEQ ID NO: 817795 - RNA, 20 nt, Artificial Sequence
  Synthetic
uuuacuuuuauuucuaagcu

SEQ ID NO: 817796 - RNA, 20 nt, Artificial Sequence
  Synthetic
uucuaagucaagaguaagcu

SEQ ID NO: 817797 - RNA, 20 nt, Artificial Sequence
  Synthetic
uucagaaaagaauguaagcu

SEQ ID NO: 817798 - RNA, 20 nt, Artificial Sequence
  Synthetic
aagauguagggaauuaagcu

SEQ ID NO: 817799 - RNA, 20 nt, Artificial Sequence
  Synthetic
aagcuagaaaugauuaagcu

SEQ ID NO: 817800 - RNA, 20 nt, Artificial Sequence
  Synthetic
uaauuaacaacaaaacagcu

SEQ ID NO: 817801 - RNA, 20 nt, Artificial Sequence
  Synthetic
aucucuugggugcaacagcu

SEQ ID NO: 817802 - RNA, 20 nt, Artificial Sequence
  Synthetic
auugcuaaauaguaacagcu

SEQ ID NO: 817803 - RNA, 20 nt, Artificial Sequence
  Synthetic
cuaaauaccaacacacagcu

SEQ ID NO: 817804 - RNA, 20 nt, Artificial Sequence
  Synthetic
acuuacaguuccacacagcu

SEQ ID NO: 817805 - RNA, 20 nt, Artificial Sequence
  Synthetic
uuacucaaggucacacagcu

SEQ ID NO: 817806 - RNA, 20 nt, Artificial Sequence
  Synthetic
aaaguuuuaaauacacagcu

SEQ ID NO: 817807 - RNA, 20 nt, Artificial Sequence
  Synthetic
ucaccauaaccaccacagcu

SEQ ID NO: 817808 - RNA, 20 nt, Artificial Sequence
  Synthetic
ccuuuggcuuccccacagcu

SEQ ID NO: 817809 - RNA, 20 nt, Artificial Sequence
  Synthetic
aaagagagaggaagacagcu

SEQ ID NO: 817810 - RNA, 20 nt, Artificial Sequence
  Synthetic
aguauuaaauuaagacagcu

SEQ ID NO: 817811 - RNA, 20 nt, Artificial Sequence
  Synthetic
cuauuuauucacugacagcu

SEQ ID NO: 817812 - RNA, 20 nt, Artificial Sequence
  Synthetic
agucaaugguucugacagcu

SEQ ID NO: 817813 - RNA, 20 nt, Artificial Sequence
  Synthetic
cauuggcuugggguacagcu

SEQ ID NO: 817814 - RNA, 20 nt, Artificial Sequence
  Synthetic
auuuuaaguuaauuacagcu

SEQ ID NO: 817815 - RNA, 20 nt, Artificial Sequence
  Synthetic
aaugcauagcucuuacagcu

SEQ ID NO: 817816 - RNA, 20 nt, Artificial Sequence
  Synthetic
cugugcuccccaaaccagcu

SEQ ID NO: 817817 - RNA, 20 nt, Artificial Sequence
  Synthetic
agucaauauuccaaccagcu

SEQ ID NO: 817818 - RNA, 20 nt, Artificial Sequence
  Synthetic
ccaaacagcaggcaccagcu

SEQ ID NO: 817819 - RNA, 20 nt, Artificial Sequence
  Synthetic
ccaggaguucaagaccagcu

SEQ ID NO: 817820 - RNA, 20 nt, Artificial Sequence
  Synthetic
uagcaaacugcaacccagcu

SEQ ID NO: 817821 - RNA, 20 nt, Artificial Sequence
  Synthetic
aaugaauauaguacccagcu

SEQ ID NO: 817822 - RNA, 20 nt, Artificial Sequence
  Synthetic
cccaguccccacucccagcu

SEQ ID NO: 817823 - RNA, 20 nt, Artificial Sequence
  Synthetic
ucagucuggaaaagccagcu

SEQ ID NO: 817824 - RNA, 20 nt, Artificial Sequence
  Synthetic
agacuuuacuuaagccagcu

SEQ ID NO: 817825 - RNA, 20 nt, Artificial Sequence
  Synthetic
uauaugaauaagagccagcu

SEQ ID NO: 817826 - RNA, 20 nt, Artificial Sequence
  Synthetic
ugcaucgcggcacuccagcu

SEQ ID NO: 817827 - RNA, 20 nt, Artificial Sequence
  Synthetic
cucaccacugcacuccagcu

SEQ ID NO: 817828 - RNA, 20 nt, Artificial Sequence
  Synthetic
cacaccauugcacuccagcu

SEQ ID NO: 817829 - RNA, 20 nt, Artificial Sequence
  Synthetic
aacuuuguaggacuccagcu

SEQ ID NO: 817830 - RNA, 20 nt, Artificial Sequence
  Synthetic
ccauggucacugcuccagcu

SEQ ID NO: 817831 - RNA, 20 nt, Artificial Sequence
  Synthetic
ccucggccucccaagcagcu

SEQ ID NO: 817832 - RNA, 20 nt, Artificial Sequence
  Synthetic
caguagcacuaccagcagcu

SEQ ID NO: 817833 - RNA, 20 nt, Artificial Sequence
  Synthetic
aaagacaugggccagcagcu

SEQ ID NO: 817834 - RNA, 20 nt, Artificial Sequence
  Synthetic
ccucagccuccagagcagcu

SEQ ID NO: 817835 - RNA, 20 nt, Artificial Sequence
  Synthetic
cgucauccucccgagcagcu

SEQ ID NO: 817836 - RNA, 20 nt, Artificial Sequence
  Synthetic
agaguuaauucugagcagcu

SEQ ID NO: 817837 - RNA, 20 nt, Artificial Sequence
  Synthetic
ugcuagccaugauagcagcu

SEQ ID NO: 817838 - RNA, 20 nt, Artificial Sequence
  Synthetic
cagcagcacuccuagcagcu

SEQ ID NO: 817839 - RNA, 20 nt, Artificial Sequence
  Synthetic
uccucuccaaaauggcagcu

SEQ ID NO: 817840 - RNA, 20 nt, Artificial Sequence
  Synthetic
aaauccacaauauggcagcu

SEQ ID NO: 817841 - RNA, 20 nt, Artificial Sequence
  Synthetic
cgcaccacugcacugcagcu

SEQ ID NO: 817842 - RNA, 20 nt, Artificial Sequence
  Synthetic
uaaaaauacaaaaaucagcu

SEQ ID NO: 817843 - RNA, 20 nt, Artificial Sequence
  Synthetic
uaaaauuacaaaaaucagcu

SEQ ID NO: 817844 - RNA, 20 nt, Artificial Sequence
  Synthetic
caacacacaauccaucagcu

SEQ ID NO: 817845 - RNA, 20 nt, Artificial Sequence
  Synthetic
ucagucagcaagcaucagcu

SEQ ID NO: 817846 - RNA, 20 nt, Artificial Sequence
  Synthetic
cuuccaaucagaacucagcu

SEQ ID NO: 817847 - RNA, 20 nt, Artificial Sequence
  Synthetic
aaauucuugcucccucagcu

SEQ ID NO: 817848 - RNA, 20 nt, Artificial Sequence
  Synthetic
cuccuucuccugccucagcu

SEQ ID NO: 817849 - RNA, 20 nt, Artificial Sequence
  Synthetic
ccaggagggaaaagucagcu

SEQ ID NO: 817850 - RNA, 20 nt, Artificial Sequence
  Synthetic
agaaauggagaaagucagcu

SEQ ID NO: 817851 - RNA, 20 nt, Artificial Sequence
  Synthetic
auuucaguauauagucagcu

SEQ ID NO: 817852 - RNA, 20 nt, Artificial Sequence
  Synthetic
ugcuuuauguggcuucagcu

SEQ ID NO: 817853 - RNA, 20 nt, Artificial Sequence
  Synthetic
uaauaauuaguaguucagcu

SEQ ID NO: 817854 - RNA, 20 nt, Artificial Sequence
  Synthetic
ccuuucaugaauuuucagcu

SEQ ID NO: 817855 - RNA, 20 nt, Artificial Sequence
  Synthetic
aaaagcuaaauuuuucagcu

SEQ ID NO: 817856 - RNA, 20 nt, Artificial Sequence
  Synthetic
ccucggccucacaaagagcu

SEQ ID NO: 817857 - RNA, 20 nt, Artificial Sequence
  Synthetic
ccuuguucccccaaagagcu

SEQ ID NO: 817858 - RNA, 20 nt, Artificial Sequence
  Synthetic
augggugggaugcaagagcu

SEQ ID NO: 817859 - RNA, 20 nt, Artificial Sequence
  Synthetic
cucagacacaguuaagagcu

SEQ ID NO: 817860 - RNA, 20 nt, Artificial Sequence
  Synthetic
aacaagcaaagaacagagcu

SEQ ID NO: 817861 - RNA, 20 nt, Artificial Sequence
  Synthetic
aggaaagaaccagcagagcu

SEQ ID NO: 817862 - RNA, 20 nt, Artificial Sequence
  Synthetic
acaaguuaaguggcagagcu

SEQ ID NO: 817863 - RNA, 20 nt, Artificial Sequence
  Synthetic
agguagaaaaagagagagcu

SEQ ID NO: 817864 - RNA, 20 nt, Artificial Sequence
  Synthetic
aauuuuuacccaugagagcu

SEQ ID NO: 817865 - RNA, 20 nt, Artificial Sequence
  Synthetic
aauaggaaagccugagagcu

SEQ ID NO: 817866 - RNA, 20 nt, Artificial Sequence
  Synthetic
aauuaaauaaagcuagagcu

SEQ ID NO: 817867 - RNA, 20 nt, Artificial Sequence
  Synthetic
agauguggguuaguagagcu

SEQ ID NO: 817868 - RNA, 20 nt, Artificial Sequence
  Synthetic
aacaucaggcuuuuagagcu

SEQ ID NO: 817869 - RNA, 20 nt, Artificial Sequence
  Synthetic
cacaaaagauggaaggagcu

SEQ ID NO: 817870 - RNA, 20 nt, Artificial Sequence
  Synthetic
uaguggucaguccaggagcu

SEQ ID NO: 817871 - RNA, 20 nt, Artificial Sequence
  Synthetic
uucaaaggggcaagggagcu

SEQ ID NO: 817872 - RNA, 20 nt, Artificial Sequence
  Synthetic
ucaugucugccuugggagcu

SEQ ID NO: 817873 - RNA, 20 nt, Artificial Sequence
  Synthetic
aagcccgccuuuugggagcu

SEQ ID NO: 817874 - RNA, 20 nt, Artificial Sequence
  Synthetic
agauucucugguauggagcu

SEQ ID NO: 817875 - RNA, 20 nt, Artificial Sequence
  Synthetic
aauccagcuaaacuggagcu

SEQ ID NO: 817876 - RNA, 20 nt, Artificial Sequence
  Synthetic
auggggaagacacuggagcu

SEQ ID NO: 817877 - RNA, 20 nt, Artificial Sequence
  Synthetic
uggaccaacacccuggagcu

SEQ ID NO: 817878 - RNA, 20 nt, Artificial Sequence
  Synthetic
aaaucaagagaucuggagcu

SEQ ID NO: 817879 - RNA, 20 nt, Artificial Sequence
  Synthetic
uucaaggcuacuguggagcu

SEQ ID NO: 817880 - RNA, 20 nt, Artificial Sequence
  Synthetic
uacauuuaggauuuggagcu

SEQ ID NO: 817881 - RNA, 20 nt, Artificial Sequence
  Synthetic
aaagaagagaagaaugagcu

SEQ ID NO: 817882 - RNA, 20 nt, Artificial Sequence
  Synthetic
ugccccuuguagaaugagcu

SEQ ID NO: 817883 - RNA, 20 nt, Artificial Sequence
  Synthetic
agacugggaagagaugagcu

SEQ ID NO: 817884 - RNA, 20 nt, Artificial Sequence
  Synthetic
uauucccuaggagaugagcu

SEQ ID NO: 817885 - RNA, 20 nt, Artificial Sequence
  Synthetic
agcacauauaaauaugagcu

SEQ ID NO: 817886 - RNA, 20 nt, Artificial Sequence
  Synthetic
cuaauuaacuacccugagcu

SEQ ID NO: 817887 - RNA, 20 nt, Artificial Sequence
  Synthetic
cagugaggaaaagcugagcu

SEQ ID NO: 817888 - RNA, 20 nt, Artificial Sequence
  Synthetic
uuacuguugguuucugagcu

SEQ ID NO: 817889 - RNA, 20 nt, Artificial Sequence
  Synthetic
aauuugauaguaauugagcu

SEQ ID NO: 817890 - RNA, 20 nt, Artificial Sequence
  Synthetic
caugcccuugacauugagcu

SEQ ID NO: 817891 - RNA, 20 nt, Artificial Sequence
  Synthetic
agagaaggaacccuugagcu

SEQ ID NO: 817892 - RNA, 20 nt, Artificial Sequence
  Synthetic
auuuucacuacuuuugagcu

SEQ ID NO: 817893 - RNA, 20 nt, Artificial Sequence
  Synthetic
acaaaaaaaaaaaaauagcu

SEQ ID NO: 817894 - RNA, 20 nt, Artificial Sequence
  Synthetic
aaaaauacaaaaaaauagcu

SEQ ID NO: 817895 - RNA, 20 nt, Artificial Sequence
  Synthetic
uaaaaauacaaaaaauagcu

SEQ ID NO: 817896 - RNA, 20 nt, Artificial Sequence
  Synthetic
ccucagccucccaaauagcu

SEQ ID NO: 817897 - RNA, 20 nt, Artificial Sequence
  Synthetic
aaaaaaaaaaagaaauagcu

SEQ ID NO: 817898 - RNA, 20 nt, Artificial Sequence
  Synthetic
ccucagccuccugaauagcu

SEQ ID NO: 817899 - RNA, 20 nt, Artificial Sequence
  Synthetic
aggagcugcaaaacauagcu

SEQ ID NO: 817900 - RNA, 20 nt, Artificial Sequence
  Synthetic
uaaaaaccauagccauagcu

SEQ ID NO: 817901 - RNA, 20 nt, Artificial Sequence
  Synthetic
uacccaguaaugggauagcu

SEQ ID NO: 817902 - RNA, 20 nt, Artificial Sequence
  Synthetic
cuuugccucguaguauagcu

SEQ ID NO: 817903 - RNA, 20 nt, Artificial Sequence
  Synthetic
augguaugugaauuauagcu

SEQ ID NO: 817904 - RNA, 20 nt, Artificial Sequence
  Synthetic
cuuggguucaaauccuagcu

SEQ ID NO: 817905 - RNA, 20 nt, Artificial Sequence
  Synthetic
uuccagagacaaagcuagcu

SEQ ID NO: 817906 - RNA, 20 nt, Artificial Sequence
  Synthetic
cuggcagcuggcagcuagcu

SEQ ID NO: 817907 - RNA, 20 nt, Artificial Sequence
  Synthetic
aaaaacgccugcagcuagcu

SEQ ID NO: 817908 - RNA, 20 nt, Artificial Sequence
  Synthetic
auaguauauuugaucuagcu

SEQ ID NO: 817909 - RNA, 20 nt, Artificial Sequence
  Synthetic
ccuucucguuuuaucuagcu

SEQ ID NO: 817910 - RNA, 20 nt, Artificial Sequence
  Synthetic
cuaguaucuucauucuagcu

SEQ ID NO: 817911 - RNA, 20 nt, Artificial Sequence
  Synthetic
uggucucaagauuucuagcu

SEQ ID NO: 817912 - RNA, 20 nt, Artificial Sequence
  Synthetic
ucucuuauugauuucuagcu

SEQ ID NO: 817913 - RNA, 20 nt, Artificial Sequence
  Synthetic
cuucaaccucccaaguagcu

SEQ ID NO: 817914 - RNA, 20 nt, Artificial Sequence
  Synthetic
ccacagccucccaaguagcu

SEQ ID NO: 817915 - RNA, 20 nt, Artificial Sequence
  Synthetic
ccucagccucccaaguagcu

SEQ ID NO: 817916 - RNA, 20 nt, Artificial Sequence
  Synthetic
cuucagccucccaaguagcu

SEQ ID NO: 817917 - RNA, 20 nt, Artificial Sequence
  Synthetic
ccuuagccucccaaguagcu

SEQ ID NO: 817918 - RNA, 20 nt, Artificial Sequence
  Synthetic
ccucagcuucccaaguagcu

SEQ ID NO: 817919 - RNA, 20 nt, Artificial Sequence
  Synthetic
ccucagacugccaaguagcu

SEQ ID NO: 817920 - RNA, 20 nt, Artificial Sequence
  Synthetic
ccucagccuuccaaguagcu

SEQ ID NO: 817921 - RNA, 20 nt, Artificial Sequence
  Synthetic
ccucagccuccuaaguagcu

SEQ ID NO: 817922 - RNA, 20 nt, Artificial Sequence
  Synthetic
ccucagccugcuaaguagcu

SEQ ID NO: 817923 - RNA, 20 nt, Artificial Sequence
  Synthetic
ccucagccuccagaguagcu

SEQ ID NO: 817924 - RNA, 20 nt, Artificial Sequence
  Synthetic
ccucagccuaccgaguagcu

SEQ ID NO: 817925 - RNA, 20 nt, Artificial Sequence
  Synthetic
ccuuaaccucccgaguagcu

SEQ ID NO: 817926 - RNA, 20 nt, Artificial Sequence
  Synthetic
ccucagccucccgaguagcu

SEQ ID NO: 817927 - RNA, 20 nt, Artificial Sequence
  Synthetic
cuucagccucccgaguagcu

SEQ ID NO: 817928 - RNA, 20 nt, Artificial Sequence
  Synthetic
caguagccucccgaguagcu

SEQ ID NO: 817929 - RNA, 20 nt, Artificial Sequence
  Synthetic
ccuuagccucccgaguagcu

SEQ ID NO: 817930 - RNA, 20 nt, Artificial Sequence
  Synthetic
cagccuccucccgaguagcu

SEQ ID NO: 817931 - RNA, 20 nt, Artificial Sequence
  Synthetic
ccucaggcucccgaguagcu

SEQ ID NO: 817932 - RNA, 20 nt, Artificial Sequence
  Synthetic
ccucagcuucccgaguagcu

SEQ ID NO: 817933 - RNA, 20 nt, Artificial Sequence
  Synthetic
ccucagccucucgaguagcu

SEQ ID NO: 817934 - RNA, 20 nt, Artificial Sequence
  Synthetic
ccucagccucaggaguagcu

SEQ ID NO: 817935 - RNA, 20 nt, Artificial Sequence
  Synthetic
ccucagccuccugaguagcu

SEQ ID NO: 817936 - RNA, 20 nt, Artificial Sequence
  Synthetic
ucucagccuccugaguagcu

SEQ ID NO: 817937 - RNA, 20 nt, Artificial Sequence
  Synthetic
cuucagccuccugaguagcu

SEQ ID NO: 817938 - RNA, 20 nt, Artificial Sequence
  Synthetic
ccuuagccuccugaguagcu

SEQ ID NO: 817939 - RNA, 20 nt, Artificial Sequence
  Synthetic
ccucaggcuccugaguagcu

SEQ ID NO: 817940 - RNA, 20 nt, Artificial Sequence
  Synthetic
ccucagcguccugaguagcu

SEQ ID NO: 817941 - RNA, 20 nt, Artificial Sequence
  Synthetic
ccucagccaucugaguagcu

SEQ ID NO: 817942 - RNA, 20 nt, Artificial Sequence
  Synthetic
ccucagccucuugaguagcu

SEQ ID NO: 817943 - RNA, 20 nt, Artificial Sequence
  Synthetic
ccucagccucccuaguagcu

SEQ ID NO: 817944 - RNA, 20 nt, Artificial Sequence
  Synthetic
ccucagccucccccguagcu

SEQ ID NO: 817945 - RNA, 20 nt, Artificial Sequence
  Synthetic
ccucagccucccagguagcu

SEQ ID NO: 817946 - RNA, 20 nt, Artificial Sequence
  Synthetic
ccccagccuuucggguagcu

SEQ ID NO: 817947 - RNA, 20 nt, Artificial Sequence
  Synthetic
cucagaugccugggguagcu

SEQ ID NO: 817948 - RNA, 20 nt, Artificial Sequence
  Synthetic
ccucagccuccuggguagcu

SEQ ID NO: 817949 - RNA, 20 nt, Artificial Sequence
  Synthetic
ccucagcuuccuggguagcu

SEQ ID NO: 817950 - RNA, 20 nt, Artificial Sequence
  Synthetic
ccucagacucccauguagcu

SEQ ID NO: 817951 - RNA, 20 nt, Artificial Sequence
  Synthetic
ccucagccucccguguagcu

SEQ ID NO: 817952 - RNA, 20 nt, Artificial Sequence
  Synthetic
ccuuuucucuuuguguagcu

SEQ ID NO: 817953 - RNA, 20 nt, Artificial Sequence
  Synthetic
acaaaaaaaaaaaauuagcu

SEQ ID NO: 817954 - RNA, 20 nt, Artificial Sequence
  Synthetic
aaaauacaaaaaaauuagcu

SEQ ID NO: 817955 - RNA, 20 nt, Artificial Sequence
  Synthetic
aaaaauacaaaaaauuagcu

SEQ ID NO: 817956 - RNA, 20 nt, Artificial Sequence
  Synthetic
caaaaauacaaaaauuagcu

SEQ ID NO: 817957 - RNA, 20 nt, Artificial Sequence
  Synthetic
uaaaaauacaaaaauuagcu

SEQ ID NO: 817958 - RNA, 20 nt, Artificial Sequence
  Synthetic
uaaaacuacaaaaauuagcu

SEQ ID NO: 817959 - RNA, 20 nt, Artificial Sequence
  Synthetic
cuaaaaauacaaaauuagcu

SEQ ID NO: 817960 - RNA, 20 nt, Artificial Sequence
  Synthetic
uaaaaauaguaaaauuagcu

SEQ ID NO: 817961 - RNA, 20 nt, Artificial Sequence
  Synthetic
uagccugacaaggauuagcu

SEQ ID NO: 817962 - RNA, 20 nt, Artificial Sequence
  Synthetic
uaaaaauaaaaaacuuagcu

SEQ ID NO: 817963 - RNA, 20 nt, Artificial Sequence
  Synthetic
aaaaauacaaaaacuuagcu

SEQ ID NO: 817964 - RNA, 20 nt, Artificial Sequence
  Synthetic
aaaaaaaaaaaaaguuagcu

SEQ ID NO: 817965 - RNA, 20 nt, Artificial Sequence
  Synthetic
aacauuucuucuuguuagcu

SEQ ID NO: 817966 - RNA, 20 nt, Artificial Sequence
  Synthetic
auuuaagaaacaauuuagcu

SEQ ID NO: 817967 - RNA, 20 nt, Artificial Sequence
  Synthetic
uacaaaugucugauuuagcu

SEQ ID NO: 817968 - RNA, 20 nt, Artificial Sequence
  Synthetic
ugaaaaccacugcuuuagcu

SEQ ID NO: 817969 - RNA, 20 nt, Artificial Sequence
  Synthetic
accuucaccaccuuuuagcu

SEQ ID NO: 817970 - RNA, 20 nt, Artificial Sequence
  Synthetic
acuucaauuuaaaaaacgcu

SEQ ID NO: 817971 - RNA, 20 nt, Artificial Sequence
  Synthetic
aaauacacagaguaaacgcu

SEQ ID NO: 817972 - RNA, 20 nt, Artificial Sequence
  Synthetic
cugguguuccaggugacgcu

SEQ ID NO: 817973 - RNA, 20 nt, Artificial Sequence
  Synthetic
ugacuaggaaaacauacgcu

SEQ ID NO: 817974 - RNA, 20 nt, Artificial Sequence
  Synthetic
aauccacacacacguacgcu

SEQ ID NO: 817975 - RNA, 20 nt, Artificial Sequence
  Synthetic
uuaaaaauaacuauaccgcu

SEQ ID NO: 817976 - RNA, 20 nt, Artificial Sequence
  Synthetic
ccucuucucauagcuccgcu

SEQ ID NO: 817977 - RNA, 20 nt, Artificial Sequence
  Synthetic
uaaaagcugcucuuuccgcu

SEQ ID NO: 817978 - RNA, 20 nt, Artificial Sequence
  Synthetic
ccucagccucccaaagcgcu

SEQ ID NO: 817979 - RNA, 20 nt, Artificial Sequence
  Synthetic
caucggccucccuaagcgcu

SEQ ID NO: 817980 - RNA, 20 nt, Artificial Sequence
  Synthetic
uuucagaaaacacaugcgcu

SEQ ID NO: 817981 - RNA, 20 nt, Artificial Sequence
  Synthetic
ugugugcgcgcgcgugcgcu

SEQ ID NO: 817982 - RNA, 20 nt, Artificial Sequence
  Synthetic
uaggacagcuugcuugcgcu

SEQ ID NO: 817983 - RNA, 20 nt, Artificial Sequence
  Synthetic
cucuuuucucacccaucgcu

SEQ ID NO: 817984 - RNA, 20 nt, Artificial Sequence
  Synthetic
agagaugagaaguugucgcu

SEQ ID NO: 817985 - RNA, 20 nt, Artificial Sequence
  Synthetic
uugagggugggguuuucgcu

SEQ ID NO: 817986 - RNA, 20 nt, Artificial Sequence
  Synthetic
cugaaaaucugaaaaaggcu

SEQ ID NO: 817987 - RNA, 20 nt, Artificial Sequence
  Synthetic
aagcacuuaagcaaaaggcu

SEQ ID NO: 817988 - RNA, 20 nt, Artificial Sequence
  Synthetic
uuaaggaagauacaaaggcu

SEQ ID NO: 817989 - RNA, 20 nt, Artificial Sequence
  Synthetic
aaggucaggacagaaaggcu

SEQ ID NO: 817990 - RNA, 20 nt, Artificial Sequence
  Synthetic
ucccagcuacccgaaaggcu

SEQ ID NO: 817991 - RNA, 20 nt, Artificial Sequence
  Synthetic
ugaaggcugcaggaaaggcu

SEQ ID NO: 817992 - RNA, 20 nt, Artificial Sequence
  Synthetic
caaaauaaaaucccaaggcu

SEQ ID NO: 817993 - RNA, 20 nt, Artificial Sequence
  Synthetic
uuuuucucaauggcaaggcu

SEQ ID NO: 817994 - RNA, 20 nt, Artificial Sequence
  Synthetic
uccagguuuaaugcaaggcu

SEQ ID NO: 817995 - RNA, 20 nt, Artificial Sequence
  Synthetic
uccauugccaucucaaggcu

SEQ ID NO: 817996 - RNA, 20 nt, Artificial Sequence
  Synthetic
ugagaagguaagucaaggcu

SEQ ID NO: 817997 - RNA, 20 nt, Artificial Sequence
  Synthetic
agagagagggagagaaggcu

SEQ ID NO: 817998 - RNA, 20 nt, Artificial Sequence
  Synthetic
augaaaacauugagaaggcu

SEQ ID NO: 817999 - RNA, 20 nt, Artificial Sequence
  Synthetic
caggcacuuaagggaaggcu

SEQ ID NO: 818000 - RNA, 20 nt, Artificial Sequence
  Synthetic
agauccuccuggggaaggcu

SEQ ID NO: 818001 - RNA, 20 nt, Artificial Sequence
  Synthetic
cccugcauauugugaaggcu

SEQ ID NO: 818002 - RNA, 20 nt, Artificial Sequence
  Synthetic
uauaaaagccuaauaaggcu

SEQ ID NO: 818003 - RNA, 20 nt, Artificial Sequence
  Synthetic
ugacucuuaauucuaaggcu

SEQ ID NO: 818004 - RNA, 20 nt, Artificial Sequence
  Synthetic
uaaccucagaacuuaaggcu

SEQ ID NO: 818005 - RNA, 20 nt, Artificial Sequence
  Synthetic
caugcuuucuaccacaggcu

SEQ ID NO: 818006 - RNA, 20 nt, Artificial Sequence
  Synthetic
uaagaauugaaauacaggcu

SEQ ID NO: 818007 - RNA, 20 nt, Artificial Sequence
  Synthetic
cccacaguuacauacaggcu

SEQ ID NO: 818008 - RNA, 20 nt, Artificial Sequence
  Synthetic
cucgcucugucacccaggcu

SEQ ID NO: 818009 - RNA, 20 nt, Artificial Sequence
  Synthetic
ucacucuuguugcccaggcu

SEQ ID NO: 818010 - RNA, 20 nt, Artificial Sequence
  Synthetic
acacaaaaauuagccaggcu

SEQ ID NO: 818011 - RNA, 20 nt, Artificial Sequence
  Synthetic
uccacccaagacuccaggcu

SEQ ID NO: 818012 - RNA, 20 nt, Artificial Sequence
  Synthetic
cuauaaaggaagagcaggcu

SEQ ID NO: 818013 - RNA, 20 nt, Artificial Sequence
  Synthetic
cucaguuaauguugcaggcu

SEQ ID NO: 818014 - RNA, 20 nt, Artificial Sequence
  Synthetic
auauaugacugucucaggcu

SEQ ID NO: 818015 - RNA, 20 nt, Artificial Sequence
  Synthetic
uuugcuacauauuucaggcu

SEQ ID NO: 818016 - RNA, 20 nt, Artificial Sequence
  Synthetic
uauaaaaguggcaagaggcu

SEQ ID NO: 818017 - RNA, 20 nt, Artificial Sequence
  Synthetic
aaucaugguuaacagaggcu

SEQ ID NO: 818018 - RNA, 20 nt, Artificial Sequence
  Synthetic
uugcauuauuuacagaggcu

SEQ ID NO: 818019 - RNA, 20 nt, Artificial Sequence
  Synthetic
aguauucaaaaccagaggcu

SEQ ID NO: 818020 - RNA, 20 nt, Artificial Sequence
  Synthetic
uuuuauagauaccagaggcu

SEQ ID NO: 818021 - RNA, 20 nt, Artificial Sequence
  Synthetic
aaagguaguugccagaggcu

SEQ ID NO: 818022 - RNA, 20 nt, Artificial Sequence
  Synthetic
uugcccauugagcagaggcu

SEQ ID NO: 818023 - RNA, 20 nt, Artificial Sequence
  Synthetic
augugacaaccagagaggcu

SEQ ID NO: 818024 - RNA, 20 nt, Artificial Sequence
  Synthetic
cauugcauuagagagaggcu

SEQ ID NO: 818025 - RNA, 20 nt, Artificial Sequence
  Synthetic
aauugagcuggagagaggcu

SEQ ID NO: 818026 - RNA, 20 nt, Artificial Sequence
  Synthetic
agaggaaaaacugagaggcu

SEQ ID NO: 818027 - RNA, 20 nt, Artificial Sequence
  Synthetic
ucucaauggucagcgaggcu

SEQ ID NO: 818028 - RNA, 20 nt, Artificial Sequence
  Synthetic
uuccagcgcuuugggaggcu

SEQ ID NO: 818029 - RNA, 20 nt, Artificial Sequence
  Synthetic
cacucacaguucuggaggcu

SEQ ID NO: 818030 - RNA, 20 nt, Artificial Sequence
  Synthetic
uucucacaguucuggaggcu

SEQ ID NO: 818031 - RNA, 20 nt, Artificial Sequence
  Synthetic
ugcuuauaguucuggaggcu

SEQ ID NO: 818032 - RNA, 20 nt, Artificial Sequence
  Synthetic
uucucaccguucuggaggcu

SEQ ID NO: 818033 - RNA, 20 nt, Artificial Sequence
  Synthetic
aauaaaaaauuuuggaggcu

SEQ ID NO: 818034 - RNA, 20 nt, Artificial Sequence
  Synthetic
aguagggacgagaugaggcu

SEQ ID NO: 818035 - RNA, 20 nt, Artificial Sequence
  Synthetic
ccagaaaugggagugaggcu

SEQ ID NO: 818036 - RNA, 20 nt, Artificial Sequence
  Synthetic
cggguggaugacuugaggcu

SEQ ID NO: 818037 - RNA, 20 nt, Artificial Sequence
  Synthetic
uguuuguaaauguugaggcu

SEQ ID NO: 818038 - RNA, 20 nt, Artificial Sequence
  Synthetic
uuaagaaagauguugaggcu

SEQ ID NO: 818039 - RNA, 20 nt, Artificial Sequence
  Synthetic
uugcgcuuuuaaaauaggcu

SEQ ID NO: 818040 - RNA, 20 nt, Artificial Sequence
  Synthetic
uaauaacaaugauauaggcu

SEQ ID NO: 818041 - RNA, 20 nt, Artificial Sequence
  Synthetic
caggcuuuuagagcuaggcu

SEQ ID NO: 818042 - RNA, 20 nt, Artificial Sequence
  Synthetic
aaacucugauuuaguaggcu

SEQ ID NO: 818043 - RNA, 20 nt, Artificial Sequence
  Synthetic
aggcacgcacucuguaggcu

SEQ ID NO: 818044 - RNA, 20 nt, Artificial Sequence
  Synthetic
aaaauaaugaaauuuaggcu

SEQ ID NO: 818045 - RNA, 20 nt, Artificial Sequence
  Synthetic
auaaauucauuauuuaggcu

SEQ ID NO: 818046 - RNA, 20 nt, Artificial Sequence
  Synthetic
uaaacuguauagaaccggcu

SEQ ID NO: 818047 - RNA, 20 nt, Artificial Sequence
  Synthetic
auaaaggcacaacuccggcu

SEQ ID NO: 818048 - RNA, 20 nt, Artificial Sequence
  Synthetic
aagauucaagcuaugcggcu

SEQ ID NO: 818049 - RNA, 20 nt, Artificial Sequence
  Synthetic
uaaagagaguaaaaucggcu

SEQ ID NO: 818050 - RNA, 20 nt, Artificial Sequence
  Synthetic
ccucauggagaaccucggcu

SEQ ID NO: 818051 - RNA, 20 nt, Artificial Sequence
  Synthetic
auaaaacaucaauuucggcu

SEQ ID NO: 818052 - RNA, 20 nt, Artificial Sequence
  Synthetic
uuuucuucugcaaaagggcu

SEQ ID NO: 818053 - RNA, 20 nt, Artificial Sequence
  Synthetic
caaaagagucugaaagggcu

SEQ ID NO: 818054 - RNA, 20 nt, Artificial Sequence
  Synthetic
cuauuaccaccucaagggcu

SEQ ID NO: 818055 - RNA, 20 nt, Artificial Sequence
  Synthetic
uacugaucaguauaagggcu

SEQ ID NO: 818056 - RNA, 20 nt, Artificial Sequence
  Synthetic
ucugggagcuccuaagggcu

SEQ ID NO: 818057 - RNA, 20 nt, Artificial Sequence
  Synthetic
cuggggcuggagacagggcu

SEQ ID NO: 818058 - RNA, 20 nt, Artificial Sequence
  Synthetic
uggucuguggccccagggcu

SEQ ID NO: 818059 - RNA, 20 nt, Artificial Sequence
  Synthetic
acuagguguuggccagggcu

SEQ ID NO: 818060 - RNA, 20 nt, Artificial Sequence
  Synthetic
accccucagaguucagggcu

SEQ ID NO: 818061 - RNA, 20 nt, Artificial Sequence
  Synthetic
cugugaaauagaugagggcu

SEQ ID NO: 818062 - RNA, 20 nt, Artificial Sequence
  Synthetic
uucuuucaacacugagggcu

SEQ ID NO: 818063 - RNA, 20 nt, Artificial Sequence
  Synthetic
augcauaauuuuauagggcu

SEQ ID NO: 818064 - RNA, 20 nt, Artificial Sequence
  Synthetic
uuuccccucacccuagggcu

SEQ ID NO: 818065 - RNA, 20 nt, Artificial Sequence
  Synthetic
aauuauaugauccuagggcu

SEQ ID NO: 818066 - RNA, 20 nt, Artificial Sequence
  Synthetic
caguaguuucuuuuagggcu

SEQ ID NO: 818067 - RNA, 20 nt, Artificial Sequence
  Synthetic
aaaaauaaaauucacgggcu

SEQ ID NO: 818068 - RNA, 20 nt, Artificial Sequence
  Synthetic
acugagcccaacaccgggcu

SEQ ID NO: 818069 - RNA, 20 nt, Artificial Sequence
  Synthetic
cuaagaaauuguaccgggcu

SEQ ID NO: 818070 - RNA, 20 nt, Artificial Sequence
  Synthetic
auacaaaaauuagccgggcu

SEQ ID NO: 818071 - RNA, 20 nt, Artificial Sequence
  Synthetic
aaaacaaaauuagccgggcu

SEQ ID NO: 818072 - RNA, 20 nt, Artificial Sequence
  Synthetic
caaguugaaugaaucgggcu

SEQ ID NO: 818073 - RNA, 20 nt, Artificial Sequence
  Synthetic
aaugauaguaaccaggggcu

SEQ ID NO: 818074 - RNA, 20 nt, Artificial Sequence
  Synthetic
acuggugguugccaggggcu

SEQ ID NO: 818075 - RNA, 20 nt, Artificial Sequence
  Synthetic
aucagugguuuccaggggcu

SEQ ID NO: 818076 - RNA, 20 nt, Artificial Sequence
  Synthetic
aauggugguuuccaggggcu

SEQ ID NO: 818077 - RNA, 20 nt, Artificial Sequence
  Synthetic
uuuuaaauagugcaggggcu

SEQ ID NO: 818078 - RNA, 20 nt, Artificial Sequence
  Synthetic
auauuuuaaaaagaggggcu

SEQ ID NO: 818079 - RNA, 20 nt, Artificial Sequence
  Synthetic
cuccaucuugaauaggggcu

SEQ ID NO: 818080 - RNA, 20 nt, Artificial Sequence
  Synthetic
cugucaggggguggggggcu

SEQ ID NO: 818081 - RNA, 20 nt, Artificial Sequence
  Synthetic
ccuguuggggguggggggcu

SEQ ID NO: 818082 - RNA, 20 nt, Artificial Sequence
  Synthetic
cugucgugggguggggggcu

SEQ ID NO: 818083 - RNA, 20 nt, Artificial Sequence
  Synthetic
ucuaagcugcaaguggggcu

SEQ ID NO: 818084 - RNA, 20 nt, Artificial Sequence
  Synthetic
aacuagaugccaguggggcu

SEQ ID NO: 818085 - RNA, 20 nt, Artificial Sequence
  Synthetic
aauaggugccuauuggggcu

SEQ ID NO: 818086 - RNA, 20 nt, Artificial Sequence
  Synthetic
ugagaguugaacaaugggcu

SEQ ID NO: 818087 - RNA, 20 nt, Artificial Sequence
  Synthetic
uugggcuucaagccugggcu

SEQ ID NO: 818088 - RNA, 20 nt, Artificial Sequence
  Synthetic
caaccuccaccuccugggcu

SEQ ID NO: 818089 - RNA, 20 nt, Artificial Sequence
  Synthetic
uauggguuacuuccugggcu

SEQ ID NO: 818090 - RNA, 20 nt, Artificial Sequence
  Synthetic
uugacugacucagcugggcu

SEQ ID NO: 818091 - RNA, 20 nt, Artificial Sequence
  Synthetic
caggaauuaaccucugggcu

SEQ ID NO: 818092 - RNA, 20 nt, Artificial Sequence
  Synthetic
aaauaggcauauucugggcu

SEQ ID NO: 818093 - RNA, 20 nt, Artificial Sequence
  Synthetic
uuucaaugauguucugggcu

SEQ ID NO: 818094 - RNA, 20 nt, Artificial Sequence
  Synthetic
ugaaaauaaagcagugggcu

SEQ ID NO: 818095 - RNA, 20 nt, Artificial Sequence
  Synthetic
uuuacagagagaggugggcu

SEQ ID NO: 818096 - RNA, 20 nt, Artificial Sequence
  Synthetic
agucagcuaaugggugggcu

SEQ ID NO: 818097 - RNA, 20 nt, Artificial Sequence
  Synthetic
uagaauugauacugugggcu

SEQ ID NO: 818098 - RNA, 20 nt, Artificial Sequence
  Synthetic
ccagaguucuuuauugggcu

SEQ ID NO: 818099 - RNA, 20 nt, Artificial Sequence
  Synthetic
auauuaaagauccuugggcu

SEQ ID NO: 818100 - RNA, 20 nt, Artificial Sequence
  Synthetic
agaggguugcaaguugggcu

SEQ ID NO: 818101 - RNA, 20 nt, Artificial Sequence
  Synthetic
auaguggguaacuuugggcu

SEQ ID NO: 818102 - RNA, 20 nt, Artificial Sequence
  Synthetic
auacccugucacuuugggcu

SEQ ID NO: 818103 - RNA, 20 nt, Artificial Sequence
  Synthetic
cuaccccuugacuuugggcu

SEQ ID NO: 818104 - RNA, 20 nt, Artificial Sequence
  Synthetic
aaaaaggauuuguuugggcu

SEQ ID NO: 818105 - RNA, 20 nt, Artificial Sequence
  Synthetic
uuacuuaauucacaauggcu

SEQ ID NO: 818106 - RNA, 20 nt, Artificial Sequence
  Synthetic
uacguggaaguacaauggcu

SEQ ID NO: 818107 - RNA, 20 nt, Artificial Sequence
  Synthetic
ucuguagaaguggaauggcu

SEQ ID NO: 818108 - RNA, 20 nt, Artificial Sequence
  Synthetic
acaaugcuauauuaauggcu

SEQ ID NO: 818109 - RNA, 20 nt, Artificial Sequence
  Synthetic
acucacaguuccacauggcu

SEQ ID NO: 818110 - RNA, 20 nt, Artificial Sequence
  Synthetic
acacacaguucagcauggcu

SEQ ID NO: 818111 - RNA, 20 nt, Artificial Sequence
  Synthetic
acucacaguucagcauggcu

SEQ ID NO: 818112 - RNA, 20 nt, Artificial Sequence
  Synthetic
acucauaguucagcauggcu

SEQ ID NO: 818113 - RNA, 20 nt, Artificial Sequence
  Synthetic
auucaccauucugcauggcu

SEQ ID NO: 818114 - RNA, 20 nt, Artificial Sequence
  Synthetic
acucacugguuugcauggcu

SEQ ID NO: 818115 - RNA, 20 nt, Artificial Sequence
  Synthetic
caagggggcucuucauggcu

SEQ ID NO: 818116 - RNA, 20 nt, Artificial Sequence
  Synthetic
agagagagagagagauggcu

SEQ ID NO: 818117 - RNA, 20 nt, Artificial Sequence
  Synthetic
uacccaguaaugggauggcu

SEQ ID NO: 818118 - RNA, 20 nt, Artificial Sequence
  Synthetic
acucacaguucaauauggcu

SEQ ID NO: 818119 - RNA, 20 nt, Artificial Sequence
  Synthetic
auaagcaaauggauauggcu

SEQ ID NO: 818120 - RNA, 20 nt, Artificial Sequence
  Synthetic
acagaguuuuugguauggcu

SEQ ID NO: 818121 - RNA, 20 nt, Artificial Sequence
  Synthetic
agcuguucucacuuauggcu

SEQ ID NO: 818122 - RNA, 20 nt, Artificial Sequence
  Synthetic
aaaagggaguacuuauggcu

SEQ ID NO: 818123 - RNA, 20 nt, Artificial Sequence
  Synthetic
uuauucauuguguuauggcu

SEQ ID NO: 818124 - RNA, 20 nt, Artificial Sequence
  Synthetic
ugauagauuuuggacuggcu

SEQ ID NO: 818125 - RNA, 20 nt, Artificial Sequence
  Synthetic
auuuccauuuuauacuggcu

SEQ ID NO: 818126 - RNA, 20 nt, Artificial Sequence
  Synthetic
caagguaauugacccuggcu

SEQ ID NO: 818127 - RNA, 20 nt, Artificial Sequence
  Synthetic
uccuuauaauaauccuggcu

SEQ ID NO: 818128 - RNA, 20 nt, Artificial Sequence
  Synthetic
agauaaacagacagcuggcu

SEQ ID NO: 818129 - RNA, 20 nt, Artificial Sequence
  Synthetic
uuuuuaaaacguagcuggcu

SEQ ID NO: 818130 - RNA, 20 nt, Artificial Sequence
  Synthetic
ccaguggaucuuagcuggcu

SEQ ID NO: 818131 - RNA, 20 nt, Artificial Sequence
  Synthetic
uuaaaagaucacaucuggcu

SEQ ID NO: 818132 - RNA, 20 nt, Artificial Sequence
  Synthetic
ccugccuaauugcucuggcu

SEQ ID NO: 818133 - RNA, 20 nt, Artificial Sequence
  Synthetic
ugggcgauucccuucuggcu

SEQ ID NO: 818134 - RNA, 20 nt, Artificial Sequence
  Synthetic
uuaagugucugaaaguggcu

SEQ ID NO: 818135 - RNA, 20 nt, Artificial Sequence
  Synthetic
caucagccucccaaguggcu

SEQ ID NO: 818136 - RNA, 20 nt, Artificial Sequence
  Synthetic
ccucagccucccaaguggcu

SEQ ID NO: 818137 - RNA, 20 nt, Artificial Sequence
  Synthetic
caauauuuucaucaguggcu

SEQ ID NO: 818138 - RNA, 20 nt, Artificial Sequence
  Synthetic
ccucagccuccagaguggcu

SEQ ID NO: 818139 - RNA, 20 nt, Artificial Sequence
  Synthetic
aaaaaacugagagaguggcu

SEQ ID NO: 818140 - RNA, 20 nt, Artificial Sequence
  Synthetic
ucucagccucccgaguggcu

SEQ ID NO: 818141 - RNA, 20 nt, Artificial Sequence
  Synthetic
uagccauggcuggaguggcu

SEQ ID NO: 818142 - RNA, 20 nt, Artificial Sequence
  Synthetic
uauccauggcuggaguggcu

SEQ ID NO: 818143 - RNA, 20 nt, Artificial Sequence
  Synthetic
auuuuccuacuugaguggcu

SEQ ID NO: 818144 - RNA, 20 nt, Artificial Sequence
  Synthetic
ugugagagaugauaguggcu

SEQ ID NO: 818145 - RNA, 20 nt, Artificial Sequence
  Synthetic
uaggcauuguguuaguggcu

SEQ ID NO: 818146 - RNA, 20 nt, Artificial Sequence
  Synthetic
ccucagccucuuuaguggcu

SEQ ID NO: 818147 - RNA, 20 nt, Artificial Sequence
  Synthetic
cugaacuggaauacguggcu

SEQ ID NO: 818148 - RNA, 20 nt, Artificial Sequence
  Synthetic
acaguauuugagggguggcu

SEQ ID NO: 818149 - RNA, 20 nt, Artificial Sequence
  Synthetic
aaaaagagaugcugguggcu

SEQ ID NO: 818150 - RNA, 20 nt, Artificial Sequence
  Synthetic
uaguuaaaacuaguguggcu

SEQ ID NO: 818151 - RNA, 20 nt, Artificial Sequence
  Synthetic
acucacaguucuguguggcu

SEQ ID NO: 818152 - RNA, 20 nt, Artificial Sequence
  Synthetic
auguagauguuuuuguggcu

SEQ ID NO: 818153 - RNA, 20 nt, Artificial Sequence
  Synthetic
uuucuccuuuuuuuguggcu

SEQ ID NO: 818154 - RNA, 20 nt, Artificial Sequence
  Synthetic
aaaagaaagaugaauuggcu

SEQ ID NO: 818155 - RNA, 20 nt, Artificial Sequence
  Synthetic
uaccauucuggacauuggcu

SEQ ID NO: 818156 - RNA, 20 nt, Artificial Sequence
  Synthetic
aaaacuuauacccauuggcu

SEQ ID NO: 818157 - RNA, 20 nt, Artificial Sequence
  Synthetic
acccuuuccccccauuggcu

SEQ ID NO: 818158 - RNA, 20 nt, Artificial Sequence
  Synthetic
aaagucugauaucauuggcu

SEQ ID NO: 818159 - RNA, 20 nt, Artificial Sequence
  Synthetic
ugacuacaugcugauuggcu

SEQ ID NO: 818160 - RNA, 20 nt, Artificial Sequence
  Synthetic
aggguuucaccauauuggcu

SEQ ID NO: 818161 - RNA, 20 nt, Artificial Sequence
  Synthetic
cuauaagcaaaguauuggcu

SEQ ID NO: 818162 - RNA, 20 nt, Artificial Sequence
  Synthetic
uuucaugugucaacuuggcu

SEQ ID NO: 818163 - RNA, 20 nt, Artificial Sequence
  Synthetic
uuuuauguguuaacuuggcu

SEQ ID NO: 818164 - RNA, 20 nt, Artificial Sequence
  Synthetic
acuuacgguuccacuuggcu

SEQ ID NO: 818165 - RNA, 20 nt, Artificial Sequence
  Synthetic
uuucuuuucuuaccuuggcu

SEQ ID NO: 818166 - RNA, 20 nt, Artificial Sequence
  Synthetic
auuuaaaauaguccuuggcu

SEQ ID NO: 818167 - RNA, 20 nt, Artificial Sequence
  Synthetic
uagcccuuccuuccuuggcu

SEQ ID NO: 818168 - RNA, 20 nt, Artificial Sequence
  Synthetic
ugaagcccucuuccuuggcu

SEQ ID NO: 818169 - RNA, 20 nt, Artificial Sequence
  Synthetic
ugaagcccuuuuccuuggcu

SEQ ID NO: 818170 - RNA, 20 nt, Artificial Sequence
  Synthetic
cacacaccaagugcuuggcu

SEQ ID NO: 818171 - RNA, 20 nt, Artificial Sequence
  Synthetic
uaauccuuuacaucuuggcu

SEQ ID NO: 818172 - RNA, 20 nt, Artificial Sequence
  Synthetic
cagagaugcaagucuuggcu

SEQ ID NO: 818173 - RNA, 20 nt, Artificial Sequence
  Synthetic
aucaacauaucaaguuggcu

SEQ ID NO: 818174 - RNA, 20 nt, Artificial Sequence
  Synthetic
ugcugccuuauaaguuggcu

SEQ ID NO: 818175 - RNA, 20 nt, Artificial Sequence
  Synthetic
uucuagugagcauguuggcu

SEQ ID NO: 818176 - RNA, 20 nt, Artificial Sequence
  Synthetic
uccuuuugaagauguuggcu

SEQ ID NO: 818177 - RNA, 20 nt, Artificial Sequence
  Synthetic
ccucacggcuucuguuggcu

SEQ ID NO: 818178 - RNA, 20 nt, Artificial Sequence
  Synthetic
auccuugcuauuuguuggcu

SEQ ID NO: 818179 - RNA, 20 nt, Artificial Sequence
  Synthetic
aaacccugaacgcuuuggcu

SEQ ID NO: 818180 - RNA, 20 nt, Artificial Sequence
  Synthetic
uugaggacugcuguuuggcu

SEQ ID NO: 818181 - RNA, 20 nt, Artificial Sequence
  Synthetic
auaaaauaucaauuuuggcu

SEQ ID NO: 818182 - RNA, 20 nt, Artificial Sequence
  Synthetic
aucccuuagucauuuuggcu

SEQ ID NO: 818183 - RNA, 20 nt, Artificial Sequence
  Synthetic
agccaugauauauuuuggcu

SEQ ID NO: 818184 - RNA, 20 nt, Artificial Sequence
  Synthetic
ccaguuuauauuuuuuggcu

SEQ ID NO: 818185 - RNA, 20 nt, Artificial Sequence
  Synthetic
ccuuggccuccaaaaaugcu

SEQ ID NO: 818186 - RNA, 20 nt, Artificial Sequence
  Synthetic
augaacuuaaccaaaaugcu

SEQ ID NO: 818187 - RNA, 20 nt, Artificial Sequence
  Synthetic
uaucccauauccaaaaugcu

SEQ ID NO: 818188 - RNA, 20 nt, Artificial Sequence
  Synthetic
aauaauaucuucaaaaugcu

SEQ ID NO: 818189 - RNA, 20 nt, Artificial Sequence
  Synthetic
uuaugcucccauaaaaugcu

SEQ ID NO: 818190 - RNA, 20 nt, Artificial Sequence
  Synthetic
augucucaaugugaaaugcu

SEQ ID NO: 818191 - RNA, 20 nt, Artificial Sequence
  Synthetic
aaaccuggcaacuaaaugcu

SEQ ID NO: 818192 - RNA, 20 nt, Artificial Sequence
  Synthetic
aaauuuuaaucaacaaugcu

SEQ ID NO: 818193 - RNA, 20 nt, Artificial Sequence
  Synthetic
agcagaggcuuaacaaugcu

SEQ ID NO: 818194 - RNA, 20 nt, Artificial Sequence
  Synthetic
aggggucaauuuccaaugcu

SEQ ID NO: 818195 - RNA, 20 nt, Artificial Sequence
  Synthetic
agcuccuuaaaugcaaugcu

SEQ ID NO: 818196 - RNA, 20 nt, Artificial Sequence
  Synthetic
agcucagcaugaagaaugcu

SEQ ID NO: 818197 - RNA, 20 nt, Artificial Sequence
  Synthetic
uugagaagaugaagaaugcu

SEQ ID NO: 818198 - RNA, 20 nt, Artificial Sequence
  Synthetic
uguggguggccuagaaugcu

SEQ ID NO: 818199 - RNA, 20 nt, Artificial Sequence
  Synthetic
ugagaaacuuagcuaaugcu

SEQ ID NO: 818200 - RNA, 20 nt, Artificial Sequence
  Synthetic
ugaacucuucuuguaaugcu

SEQ ID NO: 818201 - RNA, 20 nt, Artificial Sequence
  Synthetic
uaagaucuacuauuaaugcu

SEQ ID NO: 818202 - RNA, 20 nt, Artificial Sequence
  Synthetic
agaggggaacaacacaugcu

SEQ ID NO: 818203 - RNA, 20 nt, Artificial Sequence
  Synthetic
cguaaaucaggacacaugcu

SEQ ID NO: 818204 - RNA, 20 nt, Artificial Sequence
  Synthetic
aaauguuguguguacaugcu

SEQ ID NO: 818205 - RNA, 20 nt, Artificial Sequence
  Synthetic
aauuuuuuaaauuacaugcu

SEQ ID NO: 818206 - RNA, 20 nt, Artificial Sequence
  Synthetic
caggcuugaaccaccaugcu

SEQ ID NO: 818207 - RNA, 20 nt, Artificial Sequence
  Synthetic
uuugggaucuugaccaugcu

SEQ ID NO: 818208 - RNA, 20 nt, Artificial Sequence
  Synthetic
aguauacuuagagccaugcu

SEQ ID NO: 818209 - RNA, 20 nt, Artificial Sequence
  Synthetic
aaaaaauuuaaaagcaugcu

SEQ ID NO: 818210 - RNA, 20 nt, Artificial Sequence
  Synthetic
acaaauuguaccagcaugcu

SEQ ID NO: 818211 - RNA, 20 nt, Artificial Sequence
  Synthetic
aaaaauagcuaaugcaugcu

SEQ ID NO: 818212 - RNA, 20 nt, Artificial Sequence
  Synthetic
aggagcucugcuugcaugcu

SEQ ID NO: 818213 - RNA, 20 nt, Artificial Sequence
  Synthetic
uaccagaauuuuugcaugcu

SEQ ID NO: 818214 - RNA, 20 nt, Artificial Sequence
  Synthetic
auuugauugaaaaucaugcu

SEQ ID NO: 818215 - RNA, 20 nt, Artificial Sequence
  Synthetic
ccaaauacaguuuucaugcu

SEQ ID NO: 818216 - RNA, 20 nt, Artificial Sequence
  Synthetic
ucaucuaaguaaaagaugcu

SEQ ID NO: 818217 - RNA, 20 nt, Artificial Sequence
  Synthetic
aggaaacaaaucgagaugcu

SEQ ID NO: 818218 - RNA, 20 nt, Artificial Sequence
  Synthetic
agccuguaguccuagaugcu

SEQ ID NO: 818219 - RNA, 20 nt, Artificial Sequence
  Synthetic
cugacuguguucuagaugcu

SEQ ID NO: 818220 - RNA, 20 nt, Artificial Sequence
  Synthetic
auauuccugggggcgaugcu

SEQ ID NO: 818221 - RNA, 20 nt, Artificial Sequence
  Synthetic
uuuuaucaugaauggaugcu

SEQ ID NO: 818222 - RNA, 20 nt, Artificial Sequence
  Synthetic
ugcacacaucccuggaugcu

SEQ ID NO: 818223 - RNA, 20 nt, Artificial Sequence
  Synthetic
uguauuuaagacaugaugcu

SEQ ID NO: 818224 - RNA, 20 nt, Artificial Sequence
  Synthetic
ugucaucagaauaugaugcu

SEQ ID NO: 818225 - RNA, 20 nt, Artificial Sequence
  Synthetic
auuggugguuaccugaugcu

SEQ ID NO: 818226 - RNA, 20 nt, Artificial Sequence
  Synthetic
ccccuauugaaggugaugcu

SEQ ID NO: 818227 - RNA, 20 nt, Artificial Sequence
  Synthetic
uuaaaaauaaaguugaugcu

SEQ ID NO: 818228 - RNA, 20 nt, Artificial Sequence
  Synthetic
aaggcacugccaaauaugcu

SEQ ID NO: 818229 - RNA, 20 nt, Artificial Sequence
  Synthetic
cuauucagaggaaauaugcu

SEQ ID NO: 818230 - RNA, 20 nt, Artificial Sequence
  Synthetic
ucuaggguaggccauaugcu

SEQ ID NO: 818231 - RNA, 20 nt, Artificial Sequence
  Synthetic
uucauuucuuuaccuaugcu

SEQ ID NO: 818232 - RNA, 20 nt, Artificial Sequence
  Synthetic
ucuuugccaggagcuaugcu

SEQ ID NO: 818233 - RNA, 20 nt, Artificial Sequence
  Synthetic
ucugugucaggcucuaugcu

SEQ ID NO: 818234 - RNA, 20 nt, Artificial Sequence
  Synthetic
ucugggauagauucuaugcu

SEQ ID NO: 818235 - RNA, 20 nt, Artificial Sequence
  Synthetic
uauaugccaggcaguaugcu

SEQ ID NO: 818236 - RNA, 20 nt, Artificial Sequence
  Synthetic
uugauaacauacuguaugcu

SEQ ID NO: 818237 - RNA, 20 nt, Artificial Sequence
  Synthetic
augaaguaguauuaacugcu

SEQ ID NO: 818238 - RNA, 20 nt, Artificial Sequence
  Synthetic
acgaaguaguguuaacugcu

SEQ ID NO: 818239 - RNA, 20 nt, Artificial Sequence
  Synthetic
acaucuaucuguacacugcu

SEQ ID NO: 818240 - RNA, 20 nt, Artificial Sequence
  Synthetic
auggaggaagacccacugcu

SEQ ID NO: 818241 - RNA, 20 nt, Artificial Sequence
  Synthetic
caacacuagucuccacugcu

SEQ ID NO: 818242 - RNA, 20 nt, Artificial Sequence
  Synthetic
ucuggauauaaggcacugcu

SEQ ID NO: 818243 - RNA, 20 nt, Artificial Sequence
  Synthetic
ucucugugccaggcacugcu

SEQ ID NO: 818244 - RNA, 20 nt, Artificial Sequence
  Synthetic
uucuaagagggggcacugcu

SEQ ID NO: 818245 - RNA, 20 nt, Artificial Sequence
  Synthetic
uaaccugucauggcacugcu

SEQ ID NO: 818246 - RNA, 20 nt, Artificial Sequence
  Synthetic
uugcugcaagcuucacugcu

SEQ ID NO: 818247 - RNA, 20 nt, Artificial Sequence
  Synthetic
acccccugaaguucacugcu

SEQ ID NO: 818248 - RNA, 20 nt, Artificial Sequence
  Synthetic
aauucauuggcaugacugcu

SEQ ID NO: 818249 - RNA, 20 nt, Artificial Sequence
  Synthetic
aaacuugaguucugacugcu

SEQ ID NO: 818250 - RNA, 20 nt, Artificial Sequence
  Synthetic
uuagcugaaacuugacugcu

SEQ ID NO: 818251 - RNA, 20 nt, Artificial Sequence
  Synthetic
cacauucacguauuacugcu

SEQ ID NO: 818252 - RNA, 20 nt, Artificial Sequence
  Synthetic
uaugaaauuuuauuacugcu

SEQ ID NO: 818253 - RNA, 20 nt, Artificial Sequence
  Synthetic
aauaaauauauacaccugcu

SEQ ID NO: 818254 - RNA, 20 nt, Artificial Sequence
  Synthetic
caccagcccuuccaccugcu

SEQ ID NO: 818255 - RNA, 20 nt, Artificial Sequence
  Synthetic
uaaagucugacaucccugcu

SEQ ID NO: 818256 - RNA, 20 nt, Artificial Sequence
  Synthetic
agacugucugacucccugcu

SEQ ID NO: 818257 - RNA, 20 nt, Artificial Sequence
  Synthetic
agcaauacaaugagccugcu

SEQ ID NO: 818258 - RNA, 20 nt, Artificial Sequence
  Synthetic
cacugcaaccuccgccugcu

SEQ ID NO: 818259 - RNA, 20 nt, Artificial Sequence
  Synthetic
caucuuguucuaugccugcu

SEQ ID NO: 818260 - RNA, 20 nt, Artificial Sequence
  Synthetic
uuuuuuaagagacuccugcu

SEQ ID NO: 818261 - RNA, 20 nt, Artificial Sequence
  Synthetic
cuaccaugauaucuccugcu

SEQ ID NO: 818262 - RNA, 20 nt, Artificial Sequence
  Synthetic
uuucuuauccacaagcugcu

SEQ ID NO: 818263 - RNA, 20 nt, Artificial Sequence
  Synthetic
cgccugugguaccagcugcu

SEQ ID NO: 818264 - RNA, 20 nt, Artificial Sequence
  Synthetic
cgccuguagucccagcugcu

SEQ ID NO: 818265 - RNA, 20 nt, Artificial Sequence
  Synthetic
ugugaagagaaagagcugcu

SEQ ID NO: 818266 - RNA, 20 nt, Artificial Sequence
  Synthetic
aaaggagaaacauagcugcu

SEQ ID NO: 818267 - RNA, 20 nt, Artificial Sequence
  Synthetic
aauauagcauucccgcugcu

SEQ ID NO: 818268 - RNA, 20 nt, Artificial Sequence
  Synthetic
ucauuaaaacacaggcugcu

SEQ ID NO: 818269 - RNA, 20 nt, Artificial Sequence
  Synthetic
uguuuaauauaugggcugcu

SEQ ID NO: 818270 - RNA, 20 nt, Artificial Sequence
  Synthetic
cuagagaaggaauggcugcu

SEQ ID NO: 818271 - RNA, 20 nt, Artificial Sequence
  Synthetic
cggguuaacucaaugcugcu

SEQ ID NO: 818272 - RNA, 20 nt, Artificial Sequence
  Synthetic
uucuuguuauguaugcugcu

SEQ ID NO: 818273 - RNA, 20 nt, Artificial Sequence
  Synthetic
ccaugguuugaacugcugcu

SEQ ID NO: 818274 - RNA, 20 nt, Artificial Sequence
  Synthetic
agcauagauucacugcugcu

SEQ ID NO: 818275 - RNA, 20 nt, Artificial Sequence
  Synthetic
auuaugaaaacagugcugcu

SEQ ID NO: 818276 - RNA, 20 nt, Artificial Sequence
  Synthetic
auuuugagaggauugcugcu

SEQ ID NO: 818277 - RNA, 20 nt, Artificial Sequence
  Synthetic
agcagauacugcuugcugcu

SEQ ID NO: 818278 - RNA, 20 nt, Artificial Sequence
  Synthetic
uuuucuuuccauuugcugcu

SEQ ID NO: 818279 - RNA, 20 nt, Artificial Sequence
  Synthetic
cccaaggaauuaaaucugcu

SEQ ID NO: 818280 - RNA, 20 nt, Artificial Sequence
  Synthetic
ugcauaguauuccaucugcu

SEQ ID NO: 818281 - RNA, 20 nt, Artificial Sequence
  Synthetic
acaaacauucacgaucugcu

SEQ ID NO: 818282 - RNA, 20 nt, Artificial Sequence
  Synthetic
uucuaaacuuauuaucugcu

SEQ ID NO: 818283 - RNA, 20 nt, Artificial Sequence
  Synthetic
ucauggaaaaccucucugcu

SEQ ID NO: 818284 - RNA, 20 nt, Artificial Sequence
  Synthetic
uucaaaauuauuucucugcu

SEQ ID NO: 818285 - RNA, 20 nt, Artificial Sequence
  Synthetic
cuugguagcuuuucucugcu

SEQ ID NO: 818286 - RNA, 20 nt, Artificial Sequence
  Synthetic
auguacuguauaugucugcu

SEQ ID NO: 818287 - RNA, 20 nt, Artificial Sequence
  Synthetic
acuuaaugucuuugucugcu

SEQ ID NO: 818288 - RNA, 20 nt, Artificial Sequence
  Synthetic
ccaggaguucagauucugcu

SEQ ID NO: 818289 - RNA, 20 nt, Artificial Sequence
  Synthetic
caaggaaaauauauucugcu

SEQ ID NO: 818290 - RNA, 20 nt, Artificial Sequence
  Synthetic
uuggcuuugacuauucugcu

SEQ ID NO: 818291 - RNA, 20 nt, Artificial Sequence
  Synthetic
uugccaguguagcuucugcu

SEQ ID NO: 818292 - RNA, 20 nt, Artificial Sequence
  Synthetic
cucucaagggaucuucugcu

SEQ ID NO: 818293 - RNA, 20 nt, Artificial Sequence
  Synthetic
uguaagcaguuucuucugcu

SEQ ID NO: 818294 - RNA, 20 nt, Artificial Sequence
  Synthetic
uguaauagccacuuucugcu

SEQ ID NO: 818295 - RNA, 20 nt, Artificial Sequence
  Synthetic
aaguuuacuugcuuucugcu

SEQ ID NO: 818296 - RNA, 20 nt, Artificial Sequence
  Synthetic
uuggguuuuuuuuuucugcu

SEQ ID NO: 818297 - RNA, 20 nt, Artificial Sequence
  Synthetic
aaaauaacuucaaaagugcu

SEQ ID NO: 818298 - RNA, 20 nt, Artificial Sequence
  Synthetic
uuucagccacccaaagugcu

SEQ ID NO: 818299 - RNA, 20 nt, Artificial Sequence
  Synthetic
cucggccuccccaaagugcu

SEQ ID NO: 818300 - RNA, 20 nt, Artificial Sequence
  Synthetic
ccucagacucccaaagugcu

SEQ ID NO: 818301 - RNA, 20 nt, Artificial Sequence
  Synthetic
ccuuggacucccaaagugcu

SEQ ID NO: 818302 - RNA, 20 nt, Artificial Sequence
  Synthetic
ccucagccucccaaagugcu

SEQ ID NO: 818303 - RNA, 20 nt, Artificial Sequence
  Synthetic
ucucagccucccaaagugcu

SEQ ID NO: 818304 - RNA, 20 nt, Artificial Sequence
  Synthetic
cuucagccucccaaagugcu

SEQ ID NO: 818305 - RNA, 20 nt, Artificial Sequence
  Synthetic
cguaggccucccaaagugcu

SEQ ID NO: 818306 - RNA, 20 nt, Artificial Sequence
  Synthetic
ccacggccucccaaagugcu

SEQ ID NO: 818307 - RNA, 20 nt, Artificial Sequence
  Synthetic
ccucggccucccaaagugcu

SEQ ID NO: 818308 - RNA, 20 nt, Artificial Sequence
  Synthetic
ucucggccucccaaagugcu

SEQ ID NO: 818309 - RNA, 20 nt, Artificial Sequence
  Synthetic
cuucggccucccaaagugcu

SEQ ID NO: 818310 - RNA, 20 nt, Artificial Sequence
  Synthetic
ccugggccucccaaagugcu

SEQ ID NO: 818311 - RNA, 20 nt, Artificial Sequence
  Synthetic
uccuggccucccaaagugcu

SEQ ID NO: 818312 - RNA, 20 nt, Artificial Sequence
  Synthetic
ccuuggccucccaaagugcu

SEQ ID NO: 818313 - RNA, 20 nt, Artificial Sequence
  Synthetic
ucuuggccucccaaagugcu

SEQ ID NO: 818314 - RNA, 20 nt, Artificial Sequence
  Synthetic
ccucugccucccaaagugcu

SEQ ID NO: 818315 - RNA, 20 nt, Artificial Sequence
  Synthetic
cuucugccucccaaagugcu

SEQ ID NO: 818316 - RNA, 20 nt, Artificial Sequence
  Synthetic
ccucauccucccaaagugcu

SEQ ID NO: 818317 - RNA, 20 nt, Artificial Sequence
  Synthetic
ccucaggcucccaaagugcu

SEQ ID NO: 818318 - RNA, 20 nt, Artificial Sequence
  Synthetic
ccccagcuucccaaagugcu

SEQ ID NO: 818319 - RNA, 20 nt, Artificial Sequence
  Synthetic
ccucagcuucccaaagugcu

SEQ ID NO: 818320 - RNA, 20 nt, Artificial Sequence
  Synthetic
ccuuagccuuccaaagugcu

SEQ ID NO: 818321 - RNA, 20 nt, Artificial Sequence
  Synthetic
ccucggccuuccaaagugcu

SEQ ID NO: 818322 - RNA, 20 nt, Artificial Sequence
  Synthetic
ccucggccucgcaaagugcu

SEQ ID NO: 818323 - RNA, 20 nt, Artificial Sequence
  Synthetic
ccucagccucucaaagugcu

SEQ ID NO: 818324 - RNA, 20 nt, Artificial Sequence
  Synthetic
uuucggccucucaaagugcu

SEQ ID NO: 818325 - RNA, 20 nt, Artificial Sequence
  Synthetic
ccuuggucucucaaagugcu

SEQ ID NO: 818326 - RNA, 20 nt, Artificial Sequence
  Synthetic
ccucagcauccgaaagugcu

SEQ ID NO: 818327 - RNA, 20 nt, Artificial Sequence
  Synthetic
ccucagccuccuaaagugcu

SEQ ID NO: 818328 - RNA, 20 nt, Artificial Sequence
  Synthetic
acucacacacaccaagugcu

SEQ ID NO: 818329 - RNA, 20 nt, Artificial Sequence
  Synthetic
ccucggccuccccaagugcu

SEQ ID NO: 818330 - RNA, 20 nt, Artificial Sequence
  Synthetic
aaugacccuucagaagugcu

SEQ ID NO: 818331 - RNA, 20 nt, Artificial Sequence
  Synthetic
ugaugagugugagaagugcu

SEQ ID NO: 818332 - RNA, 20 nt, Artificial Sequence
  Synthetic
aguuuaauauuagaagugcu

SEQ ID NO: 818333 - RNA, 20 nt, Artificial Sequence
  Synthetic
ccuuggccucccuaagugcu

SEQ ID NO: 818334 - RNA, 20 nt, Artificial Sequence
  Synthetic
uugagaguuuauuaagugcu

SEQ ID NO: 818335 - RNA, 20 nt, Artificial Sequence
  Synthetic
auucaguaccuuuaagugcu

SEQ ID NO: 818336 - RNA, 20 nt, Artificial Sequence
  Synthetic
uuagaacauggaacagugcu

SEQ ID NO: 818337 - RNA, 20 nt, Artificial Sequence
  Synthetic
ucuuagccucccacagugcu

SEQ ID NO: 818338 - RNA, 20 nt, Artificial Sequence
  Synthetic
ccuuggccucccacagugcu

SEQ ID NO: 818339 - RNA, 20 nt, Artificial Sequence
  Synthetic
aagggggcagagccagugcu

SEQ ID NO: 818340 - RNA, 20 nt, Artificial Sequence
  Synthetic
ugcacugcacguccagugcu

SEQ ID NO: 818341 - RNA, 20 nt, Artificial Sequence
  Synthetic
accacagcaaaagcagugcu

SEQ ID NO: 818342 - RNA, 20 nt, Artificial Sequence
  Synthetic
cacuuaaacacagcagugcu

SEQ ID NO: 818343 - RNA, 20 nt, Artificial Sequence
  Synthetic
agcuauauguuugcagugcu

SEQ ID NO: 818344 - RNA, 20 nt, Artificial Sequence
  Synthetic
ccucggccucccagagugcu

SEQ ID NO: 818345 - RNA, 20 nt, Artificial Sequence
  Synthetic
auguguacuagcugagugcu

SEQ ID NO: 818346 - RNA, 20 nt, Artificial Sequence
  Synthetic
uagaaggcauaaauagugcu

SEQ ID NO: 818347 - RNA, 20 nt, Artificial Sequence
  Synthetic
ccucagccucccauagugcu

SEQ ID NO: 818348 - RNA, 20 nt, Artificial Sequence
  Synthetic
ugugauguauauauagugcu

SEQ ID NO: 818349 - RNA, 20 nt, Artificial Sequence
  Synthetic
ugauauuuuuaaaacgugcu

SEQ ID NO: 818350 - RNA, 20 nt, Artificial Sequence
  Synthetic
aagaaucuuaaacaggugcu

SEQ ID NO: 818351 - RNA, 20 nt, Artificial Sequence
  Synthetic
uauaauaauugugaggugcu

SEQ ID NO: 818352 - RNA, 20 nt, Artificial Sequence
  Synthetic
aauggcaaaguauaggugcu

SEQ ID NO: 818353 - RNA, 20 nt, Artificial Sequence
  Synthetic
ccuacucaauaaacggugcu

SEQ ID NO: 818354 - RNA, 20 nt, Artificial Sequence
  Synthetic
ccuauuuaauaaacggugcu

SEQ ID NO: 818355 - RNA, 20 nt, Artificial Sequence
  Synthetic
ucagaugguuucugggugcu

SEQ ID NO: 818356 - RNA, 20 nt, Artificial Sequence
  Synthetic
ccuauuuaauaaauggugcu

SEQ ID NO: 818357 - RNA, 20 nt, Artificial Sequence
  Synthetic
ccuauucaguaaauggugcu

SEQ ID NO: 818358 - RNA, 20 nt, Artificial Sequence
  Synthetic
ccucuucaaccaauggugcu

SEQ ID NO: 818359 - RNA, 20 nt, Artificial Sequence
  Synthetic
aauucagaagagauggugcu

SEQ ID NO: 818360 - RNA, 20 nt, Artificial Sequence
  Synthetic
ucacuuggagugauggugcu

SEQ ID NO: 818361 - RNA, 20 nt, Artificial Sequence
  Synthetic
uguguguuagauauggugcu

SEQ ID NO: 818362 - RNA, 20 nt, Artificial Sequence
  Synthetic
uuucauaaagugguggugcu

SEQ ID NO: 818363 - RNA, 20 nt, Artificial Sequence
  Synthetic
ucuuggccucccaaugugcu

SEQ ID NO: 818364 - RNA, 20 nt, Artificial Sequence
  Synthetic
uaagcaccuacucaugugcu

SEQ ID NO: 818365 - RNA, 20 nt, Artificial Sequence
  Synthetic
cugagaaagauagaugugcu

SEQ ID NO: 818366 - RNA, 20 nt, Artificial Sequence
  Synthetic
cuucuucuacucuaugugcu

SEQ ID NO: 818367 - RNA, 20 nt, Artificial Sequence
  Synthetic
ucugcuacuguguaugugcu

SEQ ID NO: 818368 - RNA, 20 nt, Artificial Sequence
  Synthetic
cucagugauucuuaugugcu

SEQ ID NO: 818369 - RNA, 20 nt, Artificial Sequence
  Synthetic
ccaaagcucaaaccugugcu

SEQ ID NO: 818370 - RNA, 20 nt, Artificial Sequence
  Synthetic
acacugaagguuccugugcu

SEQ ID NO: 818371 - RNA, 20 nt, Artificial Sequence
  Synthetic
cagagcucgagugcugugcu

SEQ ID NO: 818372 - RNA, 20 nt, Artificial Sequence
  Synthetic
uuuagcucauuugcugugcu

SEQ ID NO: 818373 - RNA, 20 nt, Artificial Sequence
  Synthetic
augagauguuuuucugugcu

SEQ ID NO: 818374 - RNA, 20 nt, Artificial Sequence
  Synthetic
uaugugccaaacauugugcu

SEQ ID NO: 818375 - RNA, 20 nt, Artificial Sequence
  Synthetic
uuacaaaaaaaaguugugcu

SEQ ID NO: 818376 - RNA, 20 nt, Artificial Sequence
  Synthetic
cauuuauuacguguugugcu

SEQ ID NO: 818377 - RNA, 20 nt, Artificial Sequence
  Synthetic
uauguuucagaauuugugcu

SEQ ID NO: 818378 - RNA, 20 nt, Artificial Sequence
  Synthetic
uuuuguaugaaguuugugcu

SEQ ID NO: 818379 - RNA, 20 nt, Artificial Sequence
  Synthetic
uguggaagauaguuugugcu

SEQ ID NO: 818380 - RNA, 20 nt, Artificial Sequence
  Synthetic
agcauuagcuguuuugugcu

SEQ ID NO: 818381 - RNA, 20 nt, Artificial Sequence
  Synthetic
agcagguacuuuuuugugcu

SEQ ID NO: 818382 - RNA, 20 nt, Artificial Sequence
  Synthetic
uagagucuauuaaaauugcu

SEQ ID NO: 818383 - RNA, 20 nt, Artificial Sequence
  Synthetic
uuugcacauaccaaauugcu

SEQ ID NO: 818384 - RNA, 20 nt, Artificial Sequence
  Synthetic
ccuuagccucccaaauugcu

SEQ ID NO: 818385 - RNA, 20 nt, Artificial Sequence
  Synthetic
ccucggccucucaaauugcu

SEQ ID NO: 818386 - RNA, 20 nt, Artificial Sequence
  Synthetic
agaggagauuggaaauugcu

SEQ ID NO: 818387 - RNA, 20 nt, Artificial Sequence
  Synthetic
uguccaagagugcaauugcu

SEQ ID NO: 818388 - RNA, 20 nt, Artificial Sequence
  Synthetic
cuagccugauuucaauugcu

SEQ ID NO: 818389 - RNA, 20 nt, Artificial Sequence
  Synthetic
uauguauugagagaauugcu

SEQ ID NO: 818390 - RNA, 20 nt, Artificial Sequence
  Synthetic
agcuauaaaauuuaauugcu

SEQ ID NO: 818391 - RNA, 20 nt, Artificial Sequence
  Synthetic
aaaauugacugcacauugcu

SEQ ID NO: 818392 - RNA, 20 nt, Artificial Sequence
  Synthetic
uacccaguaauggcauugcu

SEQ ID NO: 818393 - RNA, 20 nt, Artificial Sequence
  Synthetic
uugcuauaccacagauugcu

SEQ ID NO: 818394 - RNA, 20 nt, Artificial Sequence
  Synthetic
uaccaaguaaugagauugcu

SEQ ID NO: 818395 - RNA, 20 nt, Artificial Sequence
  Synthetic
uguuuaaaauugagauugcu

SEQ ID NO: 818396 - RNA, 20 nt, Artificial Sequence
  Synthetic
ugaagucccacuagauugcu

SEQ ID NO: 818397 - RNA, 20 nt, Artificial Sequence
  Synthetic
uuuaugagaaguagauugcu

SEQ ID NO: 818398 - RNA, 20 nt, Artificial Sequence
  Synthetic
uaaccaauaaugggauugcu

SEQ ID NO: 818399 - RNA, 20 nt, Artificial Sequence
  Synthetic
ugcccaauaaugggauugcu

SEQ ID NO: 818400 - RNA, 20 nt, Artificial Sequence
  Synthetic
uauccaguaaugggauugcu

SEQ ID NO: 818401 - RNA, 20 nt, Artificial Sequence
  Synthetic
uaugcaguaaugggauugcu

SEQ ID NO: 818402 - RNA, 20 nt, Artificial Sequence
  Synthetic
uacucaguaaugggauugcu

SEQ ID NO: 818403 - RNA, 20 nt, Artificial Sequence
  Synthetic
aaucaggauaggugauugcu

SEQ ID NO: 818404 - RNA, 20 nt, Artificial Sequence
  Synthetic
augugcuggaguauauugcu

SEQ ID NO: 818405 - RNA, 20 nt, Artificial Sequence
  Synthetic
aucuuuuagcugcuauugcu

SEQ ID NO: 818406 - RNA, 20 nt, Artificial Sequence
  Synthetic
uuauuuucuuuuguauugcu

SEQ ID NO: 818407 - RNA, 20 nt, Artificial Sequence
  Synthetic
cuucacaaaaaggacuugcu

SEQ ID NO: 818408 - RNA, 20 nt, Artificial Sequence
  Synthetic
ccugaaauggcauacuugcu

SEQ ID NO: 818409 - RNA, 20 nt, Artificial Sequence
  Synthetic
uacugccugcccaccuugcu

SEQ ID NO: 818410 - RNA, 20 nt, Artificial Sequence
  Synthetic
aaucuagcccuucccuugcu

SEQ ID NO: 818411 - RNA, 20 nt, Artificial Sequence
  Synthetic
cagaaaaaaauguccuugcu

SEQ ID NO: 818412 - RNA, 20 nt, Artificial Sequence
  Synthetic
uuccucaucucuagcuugcu

SEQ ID NO: 818413 - RNA, 20 nt, Artificial Sequence
  Synthetic
ugugcucacaaaugcuugcu

SEQ ID NO: 818414 - RNA, 20 nt, Artificial Sequence
  Synthetic
ugccugucugccugcuugcu

SEQ ID NO: 818415 - RNA, 20 nt, Artificial Sequence
  Synthetic
uugcauacagucugcuugcu

SEQ ID NO: 818416 - RNA, 20 nt, Artificial Sequence
  Synthetic
augaagcuuuuaaucuugcu

SEQ ID NO: 818417 - RNA, 20 nt, Artificial Sequence
  Synthetic
aaguuggcugucaucuugcu

SEQ ID NO: 818418 - RNA, 20 nt, Artificial Sequence
  Synthetic
acaggaaaaaaagucuugcu

SEQ ID NO: 818419 - RNA, 20 nt, Artificial Sequence
  Synthetic
uuuggagacagagucuugcu

SEQ ID NO: 818420 - RNA, 20 nt, Artificial Sequence
  Synthetic
uuugaucaucaauucuugcu

SEQ ID NO: 818421 - RNA, 20 nt, Artificial Sequence
  Synthetic
cauaguauagaguucuugcu

SEQ ID NO: 818422 - RNA, 20 nt, Artificial Sequence
  Synthetic
cuaaauuugcugaaguugcu

SEQ ID NO: 818423 - RNA, 20 nt, Artificial Sequence
  Synthetic
cauucauucucccaguugcu

SEQ ID NO: 818424 - RNA, 20 nt, Artificial Sequence
  Synthetic
ccucaaccuccagaguugcu

SEQ ID NO: 818425 - RNA, 20 nt, Artificial Sequence
  Synthetic
uuacuuuuagccuaguugcu

SEQ ID NO: 818426 - RNA, 20 nt, Artificial Sequence
  Synthetic
uuuaagaucagcacguugcu

SEQ ID NO: 818427 - RNA, 20 nt, Artificial Sequence
  Synthetic
accgacaggagaagguugcu

SEQ ID NO: 818428 - RNA, 20 nt, Artificial Sequence
  Synthetic
acaauucauuuuggguugcu

SEQ ID NO: 818429 - RNA, 20 nt, Artificial Sequence
  Synthetic
aacucugauacacuguugcu

SEQ ID NO: 818430 - RNA, 20 nt, Artificial Sequence
  Synthetic
acuugcagugaaguguugcu

SEQ ID NO: 818431 - RNA, 20 nt, Artificial Sequence
  Synthetic
uuuugagugagaguguugcu

SEQ ID NO: 818432 - RNA, 20 nt, Artificial Sequence
  Synthetic
uuguuaugguucuuguugcu

SEQ ID NO: 818433 - RNA, 20 nt, Artificial Sequence
  Synthetic
accacagcugggaauuugcu

SEQ ID NO: 818434 - RNA, 20 nt, Artificial Sequence
  Synthetic
ucaggcuguuggaauuugcu

SEQ ID NO: 818435 - RNA, 20 nt, Artificial Sequence
  Synthetic
uuuuuugcuuuccauuugcu

SEQ ID NO: 818436 - RNA, 20 nt, Artificial Sequence
  Synthetic
uuuuuuguuuuccauuugcu

SEQ ID NO: 818437 - RNA, 20 nt, Artificial Sequence
  Synthetic
aaaaaagaauaucauuugcu

SEQ ID NO: 818438 - RNA, 20 nt, Artificial Sequence
  Synthetic
aaaugaaucauuuauuugcu

SEQ ID NO: 818439 - RNA, 20 nt, Artificial Sequence
  Synthetic
auggaacuccacccuuugcu

SEQ ID NO: 818440 - RNA, 20 nt, Artificial Sequence
  Synthetic
uaacuguuuugcccuuugcu

SEQ ID NO: 818441 - RNA, 20 nt, Artificial Sequence
  Synthetic
uguacuugcaucucuuugcu

SEQ ID NO: 818442 - RNA, 20 nt, Artificial Sequence
  Synthetic
uuauuucuaaguucuuugcu

SEQ ID NO: 818443 - RNA, 20 nt, Artificial Sequence
  Synthetic
aauguuaaaagugguuugcu

SEQ ID NO: 818444 - RNA, 20 nt, Artificial Sequence
  Synthetic
auaugccaauccuguuugcu

SEQ ID NO: 818445 - RNA, 20 nt, Artificial Sequence
  Synthetic
auuugugccauguguuugcu

SEQ ID NO: 818446 - RNA, 20 nt, Artificial Sequence
  Synthetic
cuaccuugacaaauuuugcu

SEQ ID NO: 818447 - RNA, 20 nt, Artificial Sequence
  Synthetic
uuauuuuacacuauuuugcu

SEQ ID NO: 818448 - RNA, 20 nt, Artificial Sequence
  Synthetic
cugauauccuuucuuuugcu

SEQ ID NO: 818449 - RNA, 20 nt, Artificial Sequence
  Synthetic
accacagaguugguuuugcu

SEQ ID NO: 818450 - RNA, 20 nt, Artificial Sequence
  Synthetic
augucuuauauauuuuugcu

SEQ ID NO: 818451 - RNA, 20 nt, Artificial Sequence
  Synthetic
uuugaugaucuauuuuugcu

SEQ ID NO: 818452 - RNA, 20 nt, Artificial Sequence
  Synthetic
ccuuuuccagguuuuuugcu

SEQ ID NO: 818453 - RNA, 20 nt, Artificial Sequence
  Synthetic
ccacaaagagaaaaaaaucu

SEQ ID NO: 818454 - RNA, 20 nt, Artificial Sequence
  Synthetic
aaauauuuagaaaaaaaucu

SEQ ID NO: 818455 - RNA, 20 nt, Artificial Sequence
  Synthetic
aaaaaagagacaaaaaaucu

SEQ ID NO: 818456 - RNA, 20 nt, Artificial Sequence
  Synthetic
agaagccaaggaaaaaaucu

SEQ ID NO: 818457 - RNA, 20 nt, Artificial Sequence
  Synthetic
auuauaagaauaaaaaaucu

SEQ ID NO: 818458 - RNA, 20 nt, Artificial Sequence
  Synthetic
agguaaugccauaaaaaucu

SEQ ID NO: 818459 - RNA, 20 nt, Artificial Sequence
  Synthetic
cagaguugaaaacaaaaucu

SEQ ID NO: 818460 - RNA, 20 nt, Artificial Sequence
  Synthetic
aaauuccuaaggcaaaaucu

SEQ ID NO: 818461 - RNA, 20 nt, Artificial Sequence
  Synthetic
cucuguuggagucaaaaucu

SEQ ID NO: 818462 - RNA, 20 nt, Artificial Sequence
  Synthetic
ugaaaggaaugucaaaaucu

SEQ ID NO: 818463 - RNA, 20 nt, Artificial Sequence
  Synthetic
aaaucuuaaccagaaaaucu

SEQ ID NO: 818464 - RNA, 20 nt, Artificial Sequence
  Synthetic
ugaguuucuguggaaaaucu

SEQ ID NO: 818465 - RNA, 20 nt, Artificial Sequence
  Synthetic
ucuucugaagaugaaaaucu

SEQ ID NO: 818466 - RNA, 20 nt, Artificial Sequence
  Synthetic
uuaacuuuuaaauaaaaucu

SEQ ID NO: 818467 - RNA, 20 nt, Artificial Sequence
  Synthetic
agaauccuagaauaaaaucu

SEQ ID NO: 818468 - RNA, 20 nt, Artificial Sequence
  Synthetic
ucucccaaguuauaaaaucu

SEQ ID NO: 818469 - RNA, 20 nt, Artificial Sequence
  Synthetic
auguaaaugaauuaaaaucu

SEQ ID NO: 818470 - RNA, 20 nt, Artificial Sequence
  Synthetic
uaaaaguuccauuaaaaucu

SEQ ID NO: 818471 - RNA, 20 nt, Artificial Sequence
  Synthetic
auucugacuuccacaaaucu

SEQ ID NO: 818472 - RNA, 20 nt, Artificial Sequence
  Synthetic
acagguaaucucccaaaucu

SEQ ID NO: 818473 - RNA, 20 nt, Artificial Sequence
  Synthetic
acauggaagcugccaaaucu

SEQ ID NO: 818474 - RNA, 20 nt, Artificial Sequence
  Synthetic
cauauuaaaacuccaaaucu

SEQ ID NO: 818475 - RNA, 20 nt, Artificial Sequence
  Synthetic
cucagguugcuuccaaaucu

SEQ ID NO: 818476 - RNA, 20 nt, Artificial Sequence
  Synthetic
cuuagguugcuuccaaaucu

SEQ ID NO: 818477 - RNA, 20 nt, Artificial Sequence
  Synthetic
uugcucucuagggcaaaucu

SEQ ID NO: 818478 - RNA, 20 nt, Artificial Sequence
  Synthetic
augauggcaucugcaaaucu

SEQ ID NO: 818479 - RNA, 20 nt, Artificial Sequence
  Synthetic
uuguaaggcauuucaaaucu

SEQ ID NO: 818480 - RNA, 20 nt, Artificial Sequence
  Synthetic
uuugggagagacagaaaucu

SEQ ID NO: 818481 - RNA, 20 nt, Artificial Sequence
  Synthetic
ccaauuuauauuggaaaucu

SEQ ID NO: 818482 - RNA, 20 nt, Artificial Sequence
  Synthetic
ccauacauccucugaaaucu

SEQ ID NO: 818483 - RNA, 20 nt, Artificial Sequence
  Synthetic
ccauauauccucugaaaucu

SEQ ID NO: 818484 - RNA, 20 nt, Artificial Sequence
  Synthetic
auuuaauccuucauaaaucu

SEQ ID NO: 818485 - RNA, 20 nt, Artificial Sequence
  Synthetic
uucaccagaggacuaaaucu

SEQ ID NO: 818486 - RNA, 20 nt, Artificial Sequence
  Synthetic
ugaagcacuaggcuaaaucu

SEQ ID NO: 818487 - RNA, 20 nt, Artificial Sequence
  Synthetic
uuucugauuaugcuaaaucu

SEQ ID NO: 818488 - RNA, 20 nt, Artificial Sequence
  Synthetic
aaauggguaauucuaaaucu

SEQ ID NO: 818489 - RNA, 20 nt, Artificial Sequence
  Synthetic
agcuugcugacuguaaaucu

SEQ ID NO: 818490 - RNA, 20 nt, Artificial Sequence
  Synthetic
auaguuuaggcauuaaaucu

SEQ ID NO: 818491 - RNA, 20 nt, Artificial Sequence
  Synthetic
ucaagauuuuauuuaaaucu

SEQ ID NO: 818492 - RNA, 20 nt, Artificial Sequence
  Synthetic
uauuuguuuuaaaacaaucu

SEQ ID NO: 818493 - RNA, 20 nt, Artificial Sequence
  Synthetic
cugaaaugugauaacaaucu

SEQ ID NO: 818494 - RNA, 20 nt, Artificial Sequence
  Synthetic
aaaucaaaaaggcacaaucu

SEQ ID NO: 818495 - RNA, 20 nt, Artificial Sequence
  Synthetic
agagugcaguggcacaaucu

SEQ ID NO: 818496 - RNA, 20 nt, Artificial Sequence
  Synthetic
auugaaaaauugcacaaucu

SEQ ID NO: 818497 - RNA, 20 nt, Artificial Sequence
  Synthetic
cuggggaggccucacaaucu

SEQ ID NO: 818498 - RNA, 20 nt, Artificial Sequence
  Synthetic
auaauuaccagucacaaucu

SEQ ID NO: 818499 - RNA, 20 nt, Artificial Sequence
  Synthetic
uuuuccuaaauagacaaucu

SEQ ID NO: 818500 - RNA, 20 nt, Artificial Sequence
  Synthetic
uaaaagaagcccuacaaucu

SEQ ID NO: 818501 - RNA, 20 nt, Artificial Sequence
  Synthetic
aaugucaagaauaccaaucu

SEQ ID NO: 818502 - RNA, 20 nt, Artificial Sequence
  Synthetic
cuuuauaaauuacccaaucu

SEQ ID NO: 818503 - RNA, 20 nt, Artificial Sequence
  Synthetic
cugcugggacaauccaaucu

SEQ ID NO: 818504 - RNA, 20 nt, Artificial Sequence
  Synthetic
agagugcaguggugcaaucu

SEQ ID NO: 818505 - RNA, 20 nt, Artificial Sequence
  Synthetic
acuugcuggcugugcaaucu

SEQ ID NO: 818506 - RNA, 20 nt, Artificial Sequence
  Synthetic
uuuaguuugcuuugcaaucu

SEQ ID NO: 818507 - RNA, 20 nt, Artificial Sequence
  Synthetic
agaguguaguggcucaaucu

SEQ ID NO: 818508 - RNA, 20 nt, Artificial Sequence
  Synthetic
uuuuuuuuuuuugucaaucu

SEQ ID NO: 818509 - RNA, 20 nt, Artificial Sequence
  Synthetic
uaagagaagaauuucaaucu

SEQ ID NO: 818510 - RNA, 20 nt, Artificial Sequence
  Synthetic
cuucugagaucaaagaaucu

SEQ ID NO: 818511 - RNA, 20 nt, Artificial Sequence
  Synthetic
agcuaauaaaugaagaaucu

SEQ ID NO: 818512 - RNA, 20 nt, Artificial Sequence
  Synthetic
aguuaugguacacagaaucu

SEQ ID NO: 818513 - RNA, 20 nt, Artificial Sequence
  Synthetic
auaacuaccagucagaaucu

SEQ ID NO: 818514 - RNA, 20 nt, Artificial Sequence
  Synthetic
uuucccuuauccuagaaucu

SEQ ID NO: 818515 - RNA, 20 nt, Artificial Sequence
  Synthetic
cauagaaauacguagaaucu

SEQ ID NO: 818516 - RNA, 20 nt, Artificial Sequence
  Synthetic
ucauuuccaaaggggaaucu

SEQ ID NO: 818517 - RNA, 20 nt, Artificial Sequence
  Synthetic
uugcuuguaugauggaaucu

SEQ ID NO: 818518 - RNA, 20 nt, Artificial Sequence
  Synthetic
aggacuugcuuuaugaaucu

SEQ ID NO: 818519 - RNA, 20 nt, Artificial Sequence
  Synthetic
auguuaaacauacugaaucu

SEQ ID NO: 818520 - RNA, 20 nt, Artificial Sequence
  Synthetic
uuuauagaguuucugaaucu

SEQ ID NO: 818521 - RNA, 20 nt, Artificial Sequence
  Synthetic
cauuuguaauuggugaaucu

SEQ ID NO: 818522 - RNA, 20 nt, Artificial Sequence
  Synthetic
caagagaauagcuugaaucu

SEQ ID NO: 818523 - RNA, 20 nt, Artificial Sequence
  Synthetic
caggagaaucgcuugaaucu

SEQ ID NO: 818524 - RNA, 20 nt, Artificial Sequence
  Synthetic
uuuccucaucucuugaaucu

SEQ ID NO: 818525 - RNA, 20 nt, Artificial Sequence
  Synthetic
aggggaugccauuugaaucu

SEQ ID NO: 818526 - RNA, 20 nt, Artificial Sequence
  Synthetic
uaauuccuguaaaauaaucu

SEQ ID NO: 818527 - RNA, 20 nt, Artificial Sequence
  Synthetic
aucuauagcucaaauaaucu

SEQ ID NO: 818528 - RNA, 20 nt, Artificial Sequence
  Synthetic
aaaucaugcaguaauaaucu

SEQ ID NO: 818529 - RNA, 20 nt, Artificial Sequence
  Synthetic
ucuaaagaaguugauaaucu

SEQ ID NO: 818530 - RNA, 20 nt, Artificial Sequence
  Synthetic
uucaaagucaaaacuaaucu

SEQ ID NO: 818531 - RNA, 20 nt, Artificial Sequence
  Synthetic
auugaguagauuacuaaucu

SEQ ID NO: 818532 - RNA, 20 nt, Artificial Sequence
  Synthetic
agucuguuuuugccuaaucu

SEQ ID NO: 818533 - RNA, 20 nt, Artificial Sequence
  Synthetic
aaaaacauguaaucuaaucu

SEQ ID NO: 818534 - RNA, 20 nt, Artificial Sequence
  Synthetic
ugauaauaguuugguaaucu

SEQ ID NO: 818535 - RNA, 20 nt, Artificial Sequence
  Synthetic
cuggaucacgccuguaaucu

SEQ ID NO: 818536 - RNA, 20 nt, Artificial Sequence
  Synthetic
auauauuuauauuguaaucu

SEQ ID NO: 818537 - RNA, 20 nt, Artificial Sequence
  Synthetic
agagguuauuauuguaaucu

SEQ ID NO: 818538 - RNA, 20 nt, Artificial Sequence
  Synthetic
acacaacucauuuguaaucu

SEQ ID NO: 818539 - RNA, 20 nt, Artificial Sequence
  Synthetic
uuccccuucucccuuaaucu

SEQ ID NO: 818540 - RNA, 20 nt, Artificial Sequence
  Synthetic
agauuauugacucuuaaucu

SEQ ID NO: 818541 - RNA, 20 nt, Artificial Sequence
  Synthetic
cuagguacuguucuuaaucu

SEQ ID NO: 818542 - RNA, 20 nt, Artificial Sequence
  Synthetic
auuucuuuaugguuuaaucu

SEQ ID NO: 818543 - RNA, 20 nt, Artificial Sequence
  Synthetic
cuucuuuugaauuuuaaucu

SEQ ID NO: 818544 - RNA, 20 nt, Artificial Sequence
  Synthetic
auucucauuuuuaaacaucu

SEQ ID NO: 818545 - RNA, 20 nt, Artificial Sequence
  Synthetic
uccugucauuugcaacaucu

SEQ ID NO: 818546 - RNA, 20 nt, Artificial Sequence
  Synthetic
ucuaagaguaaaccacaucu

SEQ ID NO: 818547 - RNA, 20 nt, Artificial Sequence
  Synthetic
caggaugggacagcacaucu

SEQ ID NO: 818548 - RNA, 20 nt, Artificial Sequence
  Synthetic
aauuauuuacaaucacaucu

SEQ ID NO: 818549 - RNA, 20 nt, Artificial Sequence
  Synthetic
acucaaaaagagagacaucu

SEQ ID NO: 818550 - RNA, 20 nt, Artificial Sequence
  Synthetic
ucuauguguacaugacaucu

SEQ ID NO: 818551 - RNA, 20 nt, Artificial Sequence
  Synthetic
cucgcaggagcccuacaucu

SEQ ID NO: 818552 - RNA, 20 nt, Artificial Sequence
  Synthetic
ucacuucuacgucuacaucu

SEQ ID NO: 818553 - RNA, 20 nt, Artificial Sequence
  Synthetic
auguagauuacaguacaucu

SEQ ID NO: 818554 - RNA, 20 nt, Artificial Sequence
  Synthetic
acauuuuugguuguacaucu

SEQ ID NO: 818555 - RNA, 20 nt, Artificial Sequence
  Synthetic
ucuaauaauccuuuacaucu

SEQ ID NO: 818556 - RNA, 20 nt, Artificial Sequence
  Synthetic
aguaggguaaccaaccaucu

SEQ ID NO: 818557 - RNA, 20 nt, Artificial Sequence
  Synthetic
cagcaacaucagcaccaucu

SEQ ID NO: 818558 - RNA, 20 nt, Artificial Sequence
  Synthetic
cagacaggguuucaccaucu

SEQ ID NO: 818559 - RNA, 20 nt, Artificial Sequence
  Synthetic
cuuaguugggcagaccaucu

SEQ ID NO: 818560 - RNA, 20 nt, Artificial Sequence
  Synthetic
uauaguaggauguaccaucu

SEQ ID NO: 818561 - RNA, 20 nt, Artificial Sequence
  Synthetic
cucaggugauccacccaucu

SEQ ID NO: 818562 - RNA, 20 nt, Artificial Sequence
  Synthetic
ucuaaucucuuuacccaucu

SEQ ID NO: 818563 - RNA, 20 nt, Artificial Sequence
  Synthetic
cucagaugaucugcccaucu

SEQ ID NO: 818564 - RNA, 20 nt, Artificial Sequence
  Synthetic
ugugauggaggcucccaucu

SEQ ID NO: 818565 - RNA, 20 nt, Artificial Sequence
  Synthetic
auuggaaaaagaugccaucu

SEQ ID NO: 818566 - RNA, 20 nt, Artificial Sequence
  Synthetic
auuggaaaaggaugccaucu

SEQ ID NO: 818567 - RNA, 20 nt, Artificial Sequence
  Synthetic
acucucccaggcugccaucu

SEQ ID NO: 818568 - RNA, 20 nt, Artificial Sequence
  Synthetic
ugagugcaguggugccaucu

SEQ ID NO: 818569 - RNA, 20 nt, Artificial Sequence
  Synthetic
ccuacauuuuauugccaucu

SEQ ID NO: 818570 - RNA, 20 nt, Artificial Sequence
  Synthetic
cuugcuucaucuugccaucu

SEQ ID NO: 818571 - RNA, 20 nt, Artificial Sequence
  Synthetic
ucuccaaacaagauccaucu

SEQ ID NO: 818572 - RNA, 20 nt, Artificial Sequence
  Synthetic
ugcagagugagacuccaucu

SEQ ID NO: 818573 - RNA, 20 nt, Artificial Sequence
  Synthetic
aacccucaguuucuccaucu

SEQ ID NO: 818574 - RNA, 20 nt, Artificial Sequence
  Synthetic
uuauggugugaguuccaucu

SEQ ID NO: 818575 - RNA, 20 nt, Artificial Sequence
  Synthetic
uugcucuauggccagcaucu

SEQ ID NO: 818576 - RNA, 20 nt, Artificial Sequence
  Synthetic
ugagcucuuguccagcaucu

SEQ ID NO: 818577 - RNA, 20 nt, Artificial Sequence
  Synthetic
ugagcacuggagcagcaucu

SEQ ID NO: 818578 - RNA, 20 nt, Artificial Sequence
  Synthetic
acagcaagggaagagcaucu

SEQ ID NO: 818579 - RNA, 20 nt, Artificial Sequence
  Synthetic
acucagccucccgagcaucu

SEQ ID NO: 818580 - RNA, 20 nt, Artificial Sequence
  Synthetic
ugacugcugagcaggcaucu

SEQ ID NO: 818581 - RNA, 20 nt, Artificial Sequence
  Synthetic
aguuuuccauaugggcaucu

SEQ ID NO: 818582 - RNA, 20 nt, Artificial Sequence
  Synthetic
auauguguuuuuuggcaucu

SEQ ID NO: 818583 - RNA, 20 nt, Artificial Sequence
  Synthetic
uugaaaaauugauugcaucu

SEQ ID NO: 818584 - RNA, 20 nt, Artificial Sequence
  Synthetic
aacaccuuacagaaucaucu

SEQ ID NO: 818585 - RNA, 20 nt, Artificial Sequence
  Synthetic
auuuuuugguaacaucaucu

SEQ ID NO: 818586 - RNA, 20 nt, Artificial Sequence
  Synthetic
uuucaaaauugacaucaucu

SEQ ID NO: 818587 - RNA, 20 nt, Artificial Sequence
  Synthetic
aacaccuuucagcaucaucu

SEQ ID NO: 818588 - RNA, 20 nt, Artificial Sequence
  Synthetic
aaugaucauuagcaucaucu

SEQ ID NO: 818589 - RNA, 20 nt, Artificial Sequence
  Synthetic
cuauuauuuaaugaucaucu

SEQ ID NO: 818590 - RNA, 20 nt, Artificial Sequence
  Synthetic
auauauuugcuuucucaucu

SEQ ID NO: 818591 - RNA, 20 nt, Artificial Sequence
  Synthetic
uuuguugcuggcagucaucu

SEQ ID NO: 818592 - RNA, 20 nt, Artificial Sequence
  Synthetic
acugaagaacugagucaucu

SEQ ID NO: 818593 - RNA, 20 nt, Artificial Sequence
  Synthetic
cacccaucaacccgucaucu

SEQ ID NO: 818594 - RNA, 20 nt, Artificial Sequence
  Synthetic
uccaccauugauggucaucu

SEQ ID NO: 818595 - RNA, 20 nt, Artificial Sequence
  Synthetic
auaaacuuccucugucaucu

SEQ ID NO: 818596 - RNA, 20 nt, Artificial Sequence
  Synthetic
uuguucuuuaguugucaucu

SEQ ID NO: 818597 - RNA, 20 nt, Artificial Sequence
  Synthetic
uguuacccccagauucaucu

SEQ ID NO: 818598 - RNA, 20 nt, Artificial Sequence
  Synthetic
auuuacaagucccuucaucu

SEQ ID NO: 818599 - RNA, 20 nt, Artificial Sequence
  Synthetic
ccuuccauacaucuucaucu

SEQ ID NO: 818600 - RNA, 20 nt, Artificial Sequence
  Synthetic
uagauugcacugguucaucu

SEQ ID NO: 818601 - RNA, 20 nt, Artificial Sequence
  Synthetic
agucuauuugcauuucaucu

SEQ ID NO: 818602 - RNA, 20 nt, Artificial Sequence
  Synthetic
agauuccacagauuucaucu

SEQ ID NO: 818603 - RNA, 20 nt, Artificial Sequence
  Synthetic
uaaagucaaaaaaaagaucu

SEQ ID NO: 818604 - RNA, 20 nt, Artificial Sequence
  Synthetic
uaagguuuggaaaaagaucu

SEQ ID NO: 818605 - RNA, 20 nt, Artificial Sequence
  Synthetic
cuuuuuaaggggaaagaucu

SEQ ID NO: 818606 - RNA, 20 nt, Artificial Sequence
  Synthetic
aucuagguaaugaaagaucu

SEQ ID NO: 818607 - RNA, 20 nt, Artificial Sequence
  Synthetic
cucuugauucuagaagaucu

SEQ ID NO: 818608 - RNA, 20 nt, Artificial Sequence
  Synthetic
uaaacuuuaccauaagaucu

SEQ ID NO: 818609 - RNA, 20 nt, Artificial Sequence
  Synthetic
aaaugccaacuuuaagaucu

SEQ ID NO: 818610 - RNA, 20 nt, Artificial Sequence
  Synthetic
aagggaaaaggcacagaucu

SEQ ID NO: 818611 - RNA, 20 nt, Artificial Sequence
  Synthetic
acuuuuaaacaaccagaucu

SEQ ID NO: 818612 - RNA, 20 nt, Artificial Sequence
  Synthetic
cauuccaauuuggcagaucu

SEQ ID NO: 818613 - RNA, 20 nt, Artificial Sequence
  Synthetic
aaaaguacacagucagaucu

SEQ ID NO: 818614 - RNA, 20 nt, Artificial Sequence
  Synthetic
aauaaucuauguucagaucu

SEQ ID NO: 818615 - RNA, 20 nt, Artificial Sequence
  Synthetic
ugagauguugguagagaucu

SEQ ID NO: 818616 - RNA, 20 nt, Artificial Sequence
  Synthetic
ggagugcaauggcacgaucu

SEQ ID NO: 818617 - RNA, 20 nt, Artificial Sequence
  Synthetic
ggagugcaguggcacgaucu

SEQ ID NO: 818618 - RNA, 20 nt, Artificial Sequence
  Synthetic
agugcaguggugcgcgaucu

SEQ ID NO: 818619 - RNA, 20 nt, Artificial Sequence
  Synthetic
aauacuaugagucaggaucu

SEQ ID NO: 818620 - RNA, 20 nt, Artificial Sequence
  Synthetic
aagugcugaggguaggaucu

SEQ ID NO: 818621 - RNA, 20 nt, Artificial Sequence
  Synthetic
acuacucaugcaagggaucu

SEQ ID NO: 818622 - RNA, 20 nt, Artificial Sequence
  Synthetic
acuguccacacgagggaucu

SEQ ID NO: 818623 - RNA, 20 nt, Artificial Sequence
  Synthetic
uucugaaaaaugauggaucu

SEQ ID NO: 818624 - RNA, 20 nt, Artificial Sequence
  Synthetic
aaucccagaauuguggaucu

SEQ ID NO: 818625 - RNA, 20 nt, Artificial Sequence
  Synthetic
acaaagaacuaaaaugaucu

SEQ ID NO: 818626 - RNA, 20 nt, Artificial Sequence
  Synthetic
caaaagcaagagaaugaucu

SEQ ID NO: 818627 - RNA, 20 nt, Artificial Sequence
  Synthetic
ggagugcaguggcaugaucu

SEQ ID NO: 818628 - RNA, 20 nt, Artificial Sequence
  Synthetic
uuagugcuguggcaugaucu

SEQ ID NO: 818629 - RNA, 20 nt, Artificial Sequence
  Synthetic
aaaagaguuuuucaugaucu

SEQ ID NO: 818630 - RNA, 20 nt, Artificial Sequence
  Synthetic
uuugugccaaacacugaucu

SEQ ID NO: 818631 - RNA, 20 nt, Artificial Sequence
  Synthetic
cccucaccaggcccugaucu

SEQ ID NO: 818632 - RNA, 20 nt, Artificial Sequence
  Synthetic
aguaauauuugcccugaucu

SEQ ID NO: 818633 - RNA, 20 nt, Artificial Sequence
  Synthetic
uaaguuucuaaggcugaucu

SEQ ID NO: 818634 - RNA, 20 nt, Artificial Sequence
  Synthetic
cauccccgugaugcugaucu

SEQ ID NO: 818635 - RNA, 20 nt, Artificial Sequence
  Synthetic
cgcccacucuuaucugaucu

SEQ ID NO: 818636 - RNA, 20 nt, Artificial Sequence
  Synthetic
agagugcaauggcgugaucu

SEQ ID NO: 818637 - RNA, 20 nt, Artificial Sequence
  Synthetic
cacaggaaaaugggugaucu

SEQ ID NO: 818638 - RNA, 20 nt, Artificial Sequence
  Synthetic
aagcuugcuuuuggugaucu

SEQ ID NO: 818639 - RNA, 20 nt, Artificial Sequence
  Synthetic
aauuggucuagaugugaucu

SEQ ID NO: 818640 - RNA, 20 nt, Artificial Sequence
  Synthetic
ucaugucauaccugugaucu

SEQ ID NO: 818641 - RNA, 20 nt, Artificial Sequence
  Synthetic
agagugcaguggugugaucu

SEQ ID NO: 818642 - RNA, 20 nt, Artificial Sequence
  Synthetic
uguuguacaauuugugaucu

SEQ ID NO: 818643 - RNA, 20 nt, Artificial Sequence
  Synthetic
ucugggagucuacuugaucu

SEQ ID NO: 818644 - RNA, 20 nt, Artificial Sequence
  Synthetic
agauuccagccccuugaucu

SEQ ID NO: 818645 - RNA, 20 nt, Artificial Sequence
  Synthetic
aucugcugaugucuugaucu

SEQ ID NO: 818646 - RNA, 20 nt, Artificial Sequence
  Synthetic
ugguuucuuguuguugaucu

SEQ ID NO: 818647 - RNA, 20 nt, Artificial Sequence
  Synthetic
aucugcugguauuuugaucu

SEQ ID NO: 818648 - RNA, 20 nt, Artificial Sequence
  Synthetic
auccuucauaguuuugaucu

SEQ ID NO: 818649 - RNA, 20 nt, Artificial Sequence
  Synthetic
uugcuuuguaguuuugaucu

SEQ ID NO: 818650 - RNA, 20 nt, Artificial Sequence
  Synthetic
ccacaaaaaauaaaauaucu

SEQ ID NO: 818651 - RNA, 20 nt, Artificial Sequence
  Synthetic
uauuugugucacaaauaucu

SEQ ID NO: 818652 - RNA, 20 nt, Artificial Sequence
  Synthetic
uaauguuugaccaaauaucu

SEQ ID NO: 818653 - RNA, 20 nt, Artificial Sequence
  Synthetic
acaaaggcuaggaaauaucu

SEQ ID NO: 818654 - RNA, 20 nt, Artificial Sequence
  Synthetic
caauaauacuuuaaauaucu

SEQ ID NO: 818655 - RNA, 20 nt, Artificial Sequence
  Synthetic
cacuuugguucagaauaucu

SEQ ID NO: 818656 - RNA, 20 nt, Artificial Sequence
  Synthetic
agcuuuucaauagaauaucu

SEQ ID NO: 818657 - RNA, 20 nt, Artificial Sequence
  Synthetic
uaucaauuagaauaauaucu

SEQ ID NO: 818658 - RNA, 20 nt, Artificial Sequence
  Synthetic
uuugcauauaccuaauaucu

SEQ ID NO: 818659 - RNA, 20 nt, Artificial Sequence
  Synthetic
cgaaaagcucucacauaucu

SEQ ID NO: 818660 - RNA, 20 nt, Artificial Sequence
  Synthetic
acagagcacuuuacauaucu

SEQ ID NO: 818661 - RNA, 20 nt, Artificial Sequence
  Synthetic
uuuagguugauuccauaucu

SEQ ID NO: 818662 - RNA, 20 nt, Artificial Sequence
  Synthetic
auggaggaguuagcauaucu

SEQ ID NO: 818663 - RNA, 20 nt, Artificial Sequence
  Synthetic
uuaguacucuuuggauaucu

SEQ ID NO: 818664 - RNA, 20 nt, Artificial Sequence
  Synthetic
acauauauauauauauaucu

SEQ ID NO: 818665 - RNA, 20 nt, Artificial Sequence
  Synthetic
cuuaaguugauucuauaucu

SEQ ID NO: 818666 - RNA, 20 nt, Artificial Sequence
  Synthetic
caaaauuaaacuguauaucu

SEQ ID NO: 818667 - RNA, 20 nt, Artificial Sequence
  Synthetic
uuguuuuauuguguauaucu

SEQ ID NO: 818668 - RNA, 20 nt, Artificial Sequence
  Synthetic
auaaaagccgaauuauaucu

SEQ ID NO: 818669 - RNA, 20 nt, Artificial Sequence
  Synthetic
auauuuuaucuauuauaucu

SEQ ID NO: 818670 - RNA, 20 nt, Artificial Sequence
  Synthetic
auaacugcuucuuuauaucu

SEQ ID NO: 818671 - RNA, 20 nt, Artificial Sequence
  Synthetic
auaggaugaaagaacuaucu

SEQ ID NO: 818672 - RNA, 20 nt, Artificial Sequence
  Synthetic
ucuuaguuaauagacuaucu

SEQ ID NO: 818673 - RNA, 20 nt, Artificial Sequence
  Synthetic
ccaauacauuucuacuaucu

SEQ ID NO: 818674 - RNA, 20 nt, Artificial Sequence
  Synthetic
uuacaugaaguuuacuaucu

SEQ ID NO: 818675 - RNA, 20 nt, Artificial Sequence
  Synthetic
agauuuuacuguaccuaucu

SEQ ID NO: 818676 - RNA, 20 nt, Artificial Sequence
  Synthetic
aacaacauuaacuccuaucu

SEQ ID NO: 818677 - RNA, 20 nt, Artificial Sequence
  Synthetic
uuugguaauuucugcuaucu

SEQ ID NO: 818678 - RNA, 20 nt, Artificial Sequence
  Synthetic
aauuuacauaagaucuaucu

SEQ ID NO: 818679 - RNA, 20 nt, Artificial Sequence
  Synthetic
ccaugggcugagcucuaucu

SEQ ID NO: 818680 - RNA, 20 nt, Artificial Sequence
  Synthetic
ugguaccuacuagucuaucu

SEQ ID NO: 818681 - RNA, 20 nt, Artificial Sequence
  Synthetic
caauacauuucaaaguaucu

SEQ ID NO: 818682 - RNA, 20 nt, Artificial Sequence
  Synthetic
ccucaaacucccaaguaucu

SEQ ID NO: 818683 - RNA, 20 nt, Artificial Sequence
  Synthetic
uccaaggccuugcaguaucu

SEQ ID NO: 818684 - RNA, 20 nt, Artificial Sequence
  Synthetic
uucuuggacacagaguaucu

SEQ ID NO: 818685 - RNA, 20 nt, Artificial Sequence
  Synthetic
aauaugucuguggaguaucu

SEQ ID NO: 818686 - RNA, 20 nt, Artificial Sequence
  Synthetic
ccucagccuccugaguaucu

SEQ ID NO: 818687 - RNA, 20 nt, Artificial Sequence
  Synthetic
ccucggccuccugaguaucu

SEQ ID NO: 818688 - RNA, 20 nt, Artificial Sequence
  Synthetic
agaaauuugaauuaguaucu

SEQ ID NO: 818689 - RNA, 20 nt, Artificial Sequence
  Synthetic
agagggauuuuuuaguaucu

SEQ ID NO: 818690 - RNA, 20 nt, Artificial Sequence
  Synthetic
uuacauguucuuucguaucu

SEQ ID NO: 818691 - RNA, 20 nt, Artificial Sequence
  Synthetic
ucaaauuauaguagguaucu

SEQ ID NO: 818692 - RNA, 20 nt, Artificial Sequence
  Synthetic
cauguuuuguaaggguaucu

SEQ ID NO: 818693 - RNA, 20 nt, Artificial Sequence
  Synthetic
aguuaugaacauggguaucu

SEQ ID NO: 818694 - RNA, 20 nt, Artificial Sequence
  Synthetic
agaauaaaaguuauguaucu

SEQ ID NO: 818695 - RNA, 20 nt, Artificial Sequence
  Synthetic
uuucaaaguuauguguaucu

SEQ ID NO: 818696 - RNA, 20 nt, Artificial Sequence
  Synthetic
uuacauuuucaauuguaucu

SEQ ID NO: 818697 - RNA, 20 nt, Artificial Sequence
  Synthetic
uuuaagaaaauauuguaucu

SEQ ID NO: 818698 - RNA, 20 nt, Artificial Sequence
  Synthetic
uucuacaaaaaaaauuaucu

SEQ ID NO: 818699 - RNA, 20 nt, Artificial Sequence
  Synthetic
cucacgacaaaaaauuaucu

SEQ ID NO: 818700 - RNA, 20 nt, Artificial Sequence
  Synthetic
aaaaauuuuaaaaauuaucu

SEQ ID NO: 818701 - RNA, 20 nt, Artificial Sequence
  Synthetic
uccuuuucuuucaauuaucu

SEQ ID NO: 818702 - RNA, 20 nt, Artificial Sequence
  Synthetic
auauacaucaguaauuaucu

SEQ ID NO: 818703 - RNA, 20 nt, Artificial Sequence
  Synthetic
uuuuaaguguguaauuaucu

SEQ ID NO: 818704 - RNA, 20 nt, Artificial Sequence
  Synthetic
uggauuuguauccauuaucu

SEQ ID NO: 818705 - RNA, 20 nt, Artificial Sequence
  Synthetic
auaaaccucucagauuaucu

SEQ ID NO: 818706 - RNA, 20 nt, Artificial Sequence
  Synthetic
agagucaaaggagauuaucu

SEQ ID NO: 818707 - RNA, 20 nt, Artificial Sequence
  Synthetic
aggagaagcagcuauuaucu

SEQ ID NO: 818708 - RNA, 20 nt, Artificial Sequence
  Synthetic
aaaccagugcucuauuaucu

SEQ ID NO: 818709 - RNA, 20 nt, Artificial Sequence
  Synthetic
uguucaaguccuuauuaucu

SEQ ID NO: 818710 - RNA, 20 nt, Artificial Sequence
  Synthetic
agguaccaugcuuauuaucu

SEQ ID NO: 818711 - RNA, 20 nt, Artificial Sequence
  Synthetic
aauaagaugugaacuuaucu

SEQ ID NO: 818712 - RNA, 20 nt, Artificial Sequence
  Synthetic
uuauguguugauacuuaucu

SEQ ID NO: 818713 - RNA, 20 nt, Artificial Sequence
  Synthetic
auuccacaagaugcuuaucu

SEQ ID NO: 818714 - RNA, 20 nt, Artificial Sequence
  Synthetic
uaacccuaaucaucuuaucu

SEQ ID NO: 818715 - RNA, 20 nt, Artificial Sequence
  Synthetic
uauccaacagucucuuaucu

SEQ ID NO: 818716 - RNA, 20 nt, Artificial Sequence
  Synthetic
agaauacagaaaauuuaucu

SEQ ID NO: 818717 - RNA, 20 nt, Artificial Sequence
  Synthetic
aguugggaagggauuuaucu

SEQ ID NO: 818718 - RNA, 20 nt, Artificial Sequence
  Synthetic
aaaugccagagccuuuaucu

SEQ ID NO: 818719 - RNA, 20 nt, Artificial Sequence
  Synthetic
ugaaagcauucucuuuaucu

SEQ ID NO: 818720 - RNA, 20 nt, Artificial Sequence
  Synthetic
uaaaaauuuuuucuuuaucu

SEQ ID NO: 818721 - RNA, 20 nt, Artificial Sequence
  Synthetic
ccugugcuuccauuuuaucu

SEQ ID NO: 818722 - RNA, 20 nt, Artificial Sequence
  Synthetic
ccucucugacauuuuuaucu

SEQ ID NO: 818723 - RNA, 20 nt, Artificial Sequence
  Synthetic
cuuaaagcuuuuuuuuaucu

SEQ ID NO: 818724 - RNA, 20 nt, Artificial Sequence
  Synthetic
cuucauucauagaaaacucu

SEQ ID NO: 818725 - RNA, 20 nt, Artificial Sequence
  Synthetic
uuaaucaacuagaaaacucu

SEQ ID NO: 818726 - RNA, 20 nt, Artificial Sequence
  Synthetic
agaucucacuugaaaacucu

SEQ ID NO: 818727 - RNA, 20 nt, Artificial Sequence
  Synthetic
uuauagacuuauaaaacucu

SEQ ID NO: 818728 - RNA, 20 nt, Artificial Sequence
  Synthetic
ccaggcuggucucaaacucu

SEQ ID NO: 818729 - RNA, 20 nt, Artificial Sequence
  Synthetic
ucucucccaauucaaacucu

SEQ ID NO: 818730 - RNA, 20 nt, Artificial Sequence
  Synthetic
ccaacugacacagaaacucu

SEQ ID NO: 818731 - RNA, 20 nt, Artificial Sequence
  Synthetic
aacaaaacacuagaaacucu

SEQ ID NO: 818732 - RNA, 20 nt, Artificial Sequence
  Synthetic
uuuggauacuccuaaacucu

SEQ ID NO: 818733 - RNA, 20 nt, Artificial Sequence
  Synthetic
uccugaaguugcuaaacucu

SEQ ID NO: 818734 - RNA, 20 nt, Artificial Sequence
  Synthetic
agaaccaaugaaacaacucu

SEQ ID NO: 818735 - RNA, 20 nt, Artificial Sequence
  Synthetic
ccaaaaugcugaacaacucu

SEQ ID NO: 818736 - RNA, 20 nt, Artificial Sequence
  Synthetic
aaagucuuagaagcaacucu

SEQ ID NO: 818737 - RNA, 20 nt, Artificial Sequence
  Synthetic
uaaccacuucacucaacucu

SEQ ID NO: 818738 - RNA, 20 nt, Artificial Sequence
  Synthetic
uaccuggaaaauucaacucu

SEQ ID NO: 818739 - RNA, 20 nt, Artificial Sequence
  Synthetic
aggaacaagaggagaacucu

SEQ ID NO: 818740 - RNA, 20 nt, Artificial Sequence
  Synthetic
cauuuugaaucaggaacucu

SEQ ID NO: 818741 - RNA, 20 nt, Artificial Sequence
  Synthetic
uucucugcccuaggaacucu

SEQ ID NO: 818742 - RNA, 20 nt, Artificial Sequence
  Synthetic
uuugggauucaaugaacucu

SEQ ID NO: 818743 - RNA, 20 nt, Artificial Sequence
  Synthetic
cucacugagccuugaacucu

SEQ ID NO: 818744 - RNA, 20 nt, Artificial Sequence
  Synthetic
ugcauuuugcaaauaacucu

SEQ ID NO: 818745 - RNA, 20 nt, Artificial Sequence
  Synthetic
uuccuauuacagauaacucu

SEQ ID NO: 818746 - RNA, 20 nt, Artificial Sequence
  Synthetic
auuggaggaugaaacacucu

SEQ ID NO: 818747 - RNA, 20 nt, Artificial Sequence
  Synthetic
cauuugacaacagacacucu

SEQ ID NO: 818748 - RNA, 20 nt, Artificial Sequence
  Synthetic
uauuuuauguaugacacucu

SEQ ID NO: 818749 - RNA, 20 nt, Artificial Sequence
  Synthetic
ugucuccccaacuacacucu

SEQ ID NO: 818750 - RNA, 20 nt, Artificial Sequence
  Synthetic
cucaaccuuagcuacacucu

SEQ ID NO: 818751 - RNA, 20 nt, Artificial Sequence
  Synthetic
uucuuuuuuuuucccacucu

SEQ ID NO: 818752 - RNA, 20 nt, Artificial Sequence
  Synthetic
agaaauaggacauccacucu

SEQ ID NO: 818753 - RNA, 20 nt, Artificial Sequence
  Synthetic
ugggauguucauuccacucu

SEQ ID NO: 818754 - RNA, 20 nt, Artificial Sequence
  Synthetic
caacccagcaauugcacucu

SEQ ID NO: 818755 - RNA, 20 nt, Artificial Sequence
  Synthetic
caaccaacaaggaucacucu

SEQ ID NO: 818756 - RNA, 20 nt, Artificial Sequence
  Synthetic
ugguaugucagagucacucu

SEQ ID NO: 818757 - RNA, 20 nt, Artificial Sequence
  Synthetic
uaaugccucuucuucacucu

SEQ ID NO: 818758 - RNA, 20 nt, Artificial Sequence
  Synthetic
uauuuuguuuucuucacucu

SEQ ID NO: 818759 - RNA, 20 nt, Artificial Sequence
  Synthetic
uagcuuccgucuuucacucu

SEQ ID NO: 818760 - RNA, 20 nt, Artificial Sequence
  Synthetic
ccaagagccauuuucacucu

SEQ ID NO: 818761 - RNA, 20 nt, Artificial Sequence
  Synthetic
aaaugucucuuuuucacucu

SEQ ID NO: 818762 - RNA, 20 nt, Artificial Sequence
  Synthetic
acaagauagcacaagacucu

SEQ ID NO: 818763 - RNA, 20 nt, Artificial Sequence
  Synthetic
uguuuguuaaccaagacucu

SEQ ID NO: 818764 - RNA, 20 nt, Artificial Sequence
  Synthetic
cgacagagaggggagacucu

SEQ ID NO: 818765 - RNA, 20 nt, Artificial Sequence
  Synthetic
cagacacuuuacuagacucu

SEQ ID NO: 818766 - RNA, 20 nt, Artificial Sequence
  Synthetic
ucaaguuaugcaacgacucu

SEQ ID NO: 818767 - RNA, 20 nt, Artificial Sequence
  Synthetic
ucccaaguagcugggacucu

SEQ ID NO: 818768 - RNA, 20 nt, Artificial Sequence
  Synthetic
ugacuaucacaaaugacucu

SEQ ID NO: 818769 - RNA, 20 nt, Artificial Sequence
  Synthetic
ucuacuccauuccugacucu

SEQ ID NO: 818770 - RNA, 20 nt, Artificial Sequence
  Synthetic
uaaauuuaaaaauugacucu

SEQ ID NO: 818771 - RNA, 20 nt, Artificial Sequence
  Synthetic
aauacauuauuauugacucu

SEQ ID NO: 818772 - RNA, 20 nt, Artificial Sequence
  Synthetic
uaaaucaucccacauacucu

SEQ ID NO: 818773 - RNA, 20 nt, Artificial Sequence
  Synthetic
augaagacuccauauacucu

SEQ ID NO: 818774 - RNA, 20 nt, Artificial Sequence
  Synthetic
uacacauacauauauacucu

SEQ ID NO: 818775 - RNA, 20 nt, Artificial Sequence
  Synthetic
cagaaaagagaaacuacucu

SEQ ID NO: 818776 - RNA, 20 nt, Artificial Sequence
  Synthetic
ucuaagaauuuaacuacucu

SEQ ID NO: 818777 - RNA, 20 nt, Artificial Sequence
  Synthetic
cagaaaccaggaucuacucu

SEQ ID NO: 818778 - RNA, 20 nt, Artificial Sequence
  Synthetic
caugagaugcacucuacucu

SEQ ID NO: 818779 - RNA, 20 nt, Artificial Sequence
  Synthetic
auuucugcagggucuacucu

SEQ ID NO: 818780 - RNA, 20 nt, Artificial Sequence
  Synthetic
uaaugguuaauguguacucu

SEQ ID NO: 818781 - RNA, 20 nt, Artificial Sequence
  Synthetic
aguuaugcuuacauuacucu

SEQ ID NO: 818782 - RNA, 20 nt, Artificial Sequence
  Synthetic
aaaaucuauucaaaaccucu

SEQ ID NO: 818783 - RNA, 20 nt, Artificial Sequence
  Synthetic
aaaacaauaaagcaaccucu

SEQ ID NO: 818784 - RNA, 20 nt, Artificial Sequence
  Synthetic
agcuucaggaauuaaccucu

SEQ ID NO: 818785 - RNA, 20 nt, Artificial Sequence
  Synthetic
uuuaguuuguucacaccucu

SEQ ID NO: 818786 - RNA, 20 nt, Artificial Sequence
  Synthetic
caguccuccauuacaccucu

SEQ ID NO: 818787 - RNA, 20 nt, Artificial Sequence
  Synthetic
ucagugcaaauaccaccucu

SEQ ID NO: 818788 - RNA, 20 nt, Artificial Sequence
  Synthetic
acccagacccccagaccucu

SEQ ID NO: 818789 - RNA, 20 nt, Artificial Sequence
  Synthetic
uacaucuucaucagaccucu

SEQ ID NO: 818790 - RNA, 20 nt, Artificial Sequence
  Synthetic
uuuuugccuccuagaccucu

SEQ ID NO: 818791 - RNA, 20 nt, Artificial Sequence
  Synthetic
ucuaagagcaaacgaccucu

SEQ ID NO: 818792 - RNA, 20 nt, Artificial Sequence
  Synthetic
cuuuucuuccuuauaccucu

SEQ ID NO: 818793 - RNA, 20 nt, Artificial Sequence
  Synthetic
cgggaguaguuacuaccucu

SEQ ID NO: 818794 - RNA, 20 nt, Artificial Sequence
  Synthetic
uuccacauucaauuaccucu

SEQ ID NO: 818795 - RNA, 20 nt, Artificial Sequence
  Synthetic
auaucuucuacauuaccucu

SEQ ID NO: 818796 - RNA, 20 nt, Artificial Sequence
  Synthetic
uuaagaaagugguuaccucu

SEQ ID NO: 818797 - RNA, 20 nt, Artificial Sequence
  Synthetic
ucuccucucaacaacccucu

SEQ ID NO: 818798 - RNA, 20 nt, Artificial Sequence
  Synthetic
agcacuguaacacacccucu

SEQ ID NO: 818799 - RNA, 20 nt, Artificial Sequence
  Synthetic
cccugagugcaccacccucu

SEQ ID NO: 818800 - RNA, 20 nt, Artificial Sequence
  Synthetic
aucauugccucccacccucu

SEQ ID NO: 818801 - RNA, 20 nt, Artificial Sequence
  Synthetic
cagggaaaaaagcacccucu

SEQ ID NO: 818802 - RNA, 20 nt, Artificial Sequence
  Synthetic
ugcugccuauguaccccucu

SEQ ID NO: 818803 - RNA, 20 nt, Artificial Sequence
  Synthetic
caaggauugaaagccccucu

SEQ ID NO: 818804 - RNA, 20 nt, Artificial Sequence
  Synthetic
caaugacugugggccccucu

SEQ ID NO: 818805 - RNA, 20 nt, Artificial Sequence
  Synthetic
caucuggcaggugccccucu

SEQ ID NO: 818806 - RNA, 20 nt, Artificial Sequence
  Synthetic
acucaauuuuuuuccccucu

SEQ ID NO: 818807 - RNA, 20 nt, Artificial Sequence
  Synthetic
uguauuuuuaucagcccucu

SEQ ID NO: 818808 - RNA, 20 nt, Artificial Sequence
  Synthetic
uguguuuuaaugagcccucu

SEQ ID NO: 818809 - RNA, 20 nt, Artificial Sequence
  Synthetic
aauaaaucaauuugcccucu

SEQ ID NO: 818810 - RNA, 20 nt, Artificial Sequence
  Synthetic
ucccagggauaaaucccucu

SEQ ID NO: 818811 - RNA, 20 nt, Artificial Sequence
  Synthetic
ucuauauaguaccucccucu

SEQ ID NO: 818812 - RNA, 20 nt, Artificial Sequence
  Synthetic
uuuagcauauuugucccucu

SEQ ID NO: 818813 - RNA, 20 nt, Artificial Sequence
  Synthetic
uggucucuaagaaagccucu

SEQ ID NO: 818814 - RNA, 20 nt, Artificial Sequence
  Synthetic
ugacuguaaucucagccucu

SEQ ID NO: 818815 - RNA, 20 nt, Artificial Sequence
  Synthetic
cagaagacuugagagccucu

SEQ ID NO: 818816 - RNA, 20 nt, Artificial Sequence
  Synthetic
uuaauagucucugagccucu

SEQ ID NO: 818817 - RNA, 20 nt, Artificial Sequence
  Synthetic
aggucauuuuuugagccucu

SEQ ID NO: 818818 - RNA, 20 nt, Artificial Sequence
  Synthetic
ucacugcgaccuccgccucu

SEQ ID NO: 818819 - RNA, 20 nt, Artificial Sequence
  Synthetic
uguuuuccuuuuaggccucu

SEQ ID NO: 818820 - RNA, 20 nt, Artificial Sequence
  Synthetic
cagagaauaucaaugccucu

SEQ ID NO: 818821 - RNA, 20 nt, Artificial Sequence
  Synthetic
acuugagugucacugccucu

SEQ ID NO: 818822 - RNA, 20 nt, Artificial Sequence
  Synthetic
auuauauacaggcugccucu

SEQ ID NO: 818823 - RNA, 20 nt, Artificial Sequence
  Synthetic
ucacugccaccucugccucu

SEQ ID NO: 818824 - RNA, 20 nt, Artificial Sequence
  Synthetic
ucacugcaacuucugccucu

SEQ ID NO: 818825 - RNA, 20 nt, Artificial Sequence
  Synthetic
ccugaguuuagguugccucu

SEQ ID NO: 818826 - RNA, 20 nt, Artificial Sequence
  Synthetic
aaccacagacuguugccucu

SEQ ID NO: 818827 - RNA, 20 nt, Artificial Sequence
  Synthetic
uggaauuagcuguugccucu

SEQ ID NO: 818828 - RNA, 20 nt, Artificial Sequence
  Synthetic
augguuuaacaccauccucu

SEQ ID NO: 818829 - RNA, 20 nt, Artificial Sequence
  Synthetic
acgguuuaauaccauccucu

SEQ ID NO: 818830 - RNA, 20 nt, Artificial Sequence
  Synthetic
ucaagauaaucucauccucu

SEQ ID NO: 818831 - RNA, 20 nt, Artificial Sequence
  Synthetic
ccuauaauauacuauccucu

SEQ ID NO: 818832 - RNA, 20 nt, Artificial Sequence
  Synthetic
cucuuaaguuucuauccucu

SEQ ID NO: 818833 - RNA, 20 nt, Artificial Sequence
  Synthetic
agcacagugccugcuccucu

SEQ ID NO: 818834 - RNA, 20 nt, Artificial Sequence
  Synthetic
uuuacacgacauucuccucu

SEQ ID NO: 818835 - RNA, 20 nt, Artificial Sequence
  Synthetic
uacuggaacaacauuccucu

SEQ ID NO: 818836 - RNA, 20 nt, Artificial Sequence
  Synthetic
agaaugauuucuauuccucu

SEQ ID NO: 818837 - RNA, 20 nt, Artificial Sequence
  Synthetic
auaaugaauucucuuccucu

SEQ ID NO: 818838 - RNA, 20 nt, Artificial Sequence
  Synthetic
aaggagguucucuuuccucu

SEQ ID NO: 818839 - RNA, 20 nt, Artificial Sequence
  Synthetic
uuuuagaagagaaaagcucu

SEQ ID NO: 818840 - RNA, 20 nt, Artificial Sequence
  Synthetic
uguauucaaccuaaagcucu

SEQ ID NO: 818841 - RNA, 20 nt, Artificial Sequence
  Synthetic
auuugaaaauaccaagcucu

SEQ ID NO: 818842 - RNA, 20 nt, Artificial Sequence
  Synthetic
acaauugagcaggaagcucu

SEQ ID NO: 818843 - RNA, 20 nt, Artificial Sequence
  Synthetic
auuacaaaguacuaagcucu

SEQ ID NO: 818844 - RNA, 20 nt, Artificial Sequence
  Synthetic
ucacuuuuauuuuaagcucu

SEQ ID NO: 818845 - RNA, 20 nt, Artificial Sequence
  Synthetic
uuaauaaucacaucagcucu

SEQ ID NO: 818846 - RNA, 20 nt, Artificial Sequence
  Synthetic
uaauagucuuaaggagcucu

SEQ ID NO: 818847 - RNA, 20 nt, Artificial Sequence
  Synthetic
uucauucucuauggagcucu

SEQ ID NO: 818848 - RNA, 20 nt, Artificial Sequence
  Synthetic
aauugugaacauguagcucu

SEQ ID NO: 818849 - RNA, 20 nt, Artificial Sequence
  Synthetic
aggauggaggauuacgcucu

SEQ ID NO: 818850 - RNA, 20 nt, Artificial Sequence
  Synthetic
auuaucccucugaaggcucu

SEQ ID NO: 818851 - RNA, 20 nt, Artificial Sequence
  Synthetic
accaaaauaauccaggcucu

SEQ ID NO: 818852 - RNA, 20 nt, Artificial Sequence
  Synthetic
ccuagagaugaucaggcucu

SEQ ID NO: 818853 - RNA, 20 nt, Artificial Sequence
  Synthetic
ugagaaaaucuucaggcucu

SEQ ID NO: 818854 - RNA, 20 nt, Artificial Sequence
  Synthetic
aauguuuaacaagaggcucu

SEQ ID NO: 818855 - RNA, 20 nt, Artificial Sequence
  Synthetic
aaauguaaucaaagggcucu

SEQ ID NO: 818856 - RNA, 20 nt, Artificial Sequence
  Synthetic
ucucaaagcauaagggcucu

SEQ ID NO: 818857 - RNA, 20 nt, Artificial Sequence
  Synthetic
caauuuccuucuagggcucu

SEQ ID NO: 818858 - RNA, 20 nt, Artificial Sequence
  Synthetic
acuuugaguaguagggcucu

SEQ ID NO: 818859 - RNA, 20 nt, Artificial Sequence
  Synthetic
cccagagugaaaauggcucu

SEQ ID NO: 818860 - RNA, 20 nt, Artificial Sequence
  Synthetic
aaaguuguaaauauggcucu

SEQ ID NO: 818861 - RNA, 20 nt, Artificial Sequence
  Synthetic
aaugucaaauaacuggcucu

SEQ ID NO: 818862 - RNA, 20 nt, Artificial Sequence
  Synthetic
ugguacgggucuguggcucu

SEQ ID NO: 818863 - RNA, 20 nt, Artificial Sequence
  Synthetic
agaugcacacaauuggcucu

SEQ ID NO: 818864 - RNA, 20 nt, Artificial Sequence
  Synthetic
agauacacauaauuggcucu

SEQ ID NO: 818865 - RNA, 20 nt, Artificial Sequence
  Synthetic
ugccugcauuucuuggcucu

SEQ ID NO: 818866 - RNA, 20 nt, Artificial Sequence
  Synthetic
uuucauuauauuuuggcucu

SEQ ID NO: 818867 - RNA, 20 nt, Artificial Sequence
  Synthetic
uaaugguuacuuuuggcucu

SEQ ID NO: 818868 - RNA, 20 nt, Artificial Sequence
  Synthetic
uauauaaggcauaaugcucu

SEQ ID NO: 818869 - RNA, 20 nt, Artificial Sequence
  Synthetic
uuccaaaauauacaugcucu

SEQ ID NO: 818870 - RNA, 20 nt, Artificial Sequence
  Synthetic
uauaauaguagauaugcucu

SEQ ID NO: 818871 - RNA, 20 nt, Artificial Sequence
  Synthetic
aguuuaagaaucacugcucu

SEQ ID NO: 818872 - RNA, 20 nt, Artificial Sequence
  Synthetic
auucuuucuuucccugcucu

SEQ ID NO: 818873 - RNA, 20 nt, Artificial Sequence
  Synthetic
uucucccuggugccugcucu

SEQ ID NO: 818874 - RNA, 20 nt, Artificial Sequence
  Synthetic
caauuugaaauagcugcucu

SEQ ID NO: 818875 - RNA, 20 nt, Artificial Sequence
  Synthetic
aguuugcugaccucugcucu

SEQ ID NO: 818876 - RNA, 20 nt, Artificial Sequence
  Synthetic
aguagucuucucagugcucu

SEQ ID NO: 818877 - RNA, 20 nt, Artificial Sequence
  Synthetic
uagaacuuuguuagugcucu

SEQ ID NO: 818878 - RNA, 20 nt, Artificial Sequence
  Synthetic
uuguucucugaaugugcucu

SEQ ID NO: 818879 - RNA, 20 nt, Artificial Sequence
  Synthetic
ucccuuaggauaauugcucu

SEQ ID NO: 818880 - RNA, 20 nt, Artificial Sequence
  Synthetic
uugaacagacuucuugcucu

SEQ ID NO: 818881 - RNA, 20 nt, Artificial Sequence
  Synthetic
ugaauaucauaaaaaucucu

SEQ ID NO: 818882 - RNA, 20 nt, Artificial Sequence
  Synthetic
uacaaagccagccaaucucu

SEQ ID NO: 818883 - RNA, 20 nt, Artificial Sequence
  Synthetic
cacaacggaccagaaucucu

SEQ ID NO: 818884 - RNA, 20 nt, Artificial Sequence
  Synthetic
caccacauaccagaaucucu

SEQ ID NO: 818885 - RNA, 20 nt, Artificial Sequence
  Synthetic
ccaacuaaaucagaaucucu

SEQ ID NO: 818886 - RNA, 20 nt, Artificial Sequence
  Synthetic
auguuuaaaauguaaucucu

SEQ ID NO: 818887 - RNA, 20 nt, Artificial Sequence
  Synthetic
uugcuuuuuguuuaaucucu

SEQ ID NO: 818888 - RNA, 20 nt, Artificial Sequence
  Synthetic
auugaagccucaacaucucu

SEQ ID NO: 818889 - RNA, 20 nt, Artificial Sequence
  Synthetic
ucucugguugucacaucucu

SEQ ID NO: 818890 - RNA, 20 nt, Artificial Sequence
  Synthetic
aacagcauauucacaucucu

SEQ ID NO: 818891 - RNA, 20 nt, Artificial Sequence
  Synthetic
ccuacugaaucagcaucucu

SEQ ID NO: 818892 - RNA, 20 nt, Artificial Sequence
  Synthetic
cccagagccugaucaucucu

SEQ ID NO: 818893 - RNA, 20 nt, Artificial Sequence
  Synthetic
ugcgaguggggcucaucucu

SEQ ID NO: 818894 - RNA, 20 nt, Artificial Sequence
  Synthetic
aaaaccucuuugucaucucu

SEQ ID NO: 818895 - RNA, 20 nt, Artificial Sequence
  Synthetic
acauuagaagauucaucucu

SEQ ID NO: 818896 - RNA, 20 nt, Artificial Sequence
  Synthetic
uuuauuuuccuuucaucucu

SEQ ID NO: 818897 - RNA, 20 nt, Artificial Sequence
  Synthetic
ucaaaauuccacagaucucu

SEQ ID NO: 818898 - RNA, 20 nt, Artificial Sequence
  Synthetic
ucaaaguuccacagaucucu

SEQ ID NO: 818899 - RNA, 20 nt, Artificial Sequence
  Synthetic
ucaaauuuccacagaucucu

SEQ ID NO: 818900 - RNA, 20 nt, Artificial Sequence
  Synthetic
cagacuaacagcggaucucu

SEQ ID NO: 818901 - RNA, 20 nt, Artificial Sequence
  Synthetic
agguauccuuaaugaucucu

SEQ ID NO: 818902 - RNA, 20 nt, Artificial Sequence
  Synthetic
aaauaaaaugaaauaucucu

SEQ ID NO: 818903 - RNA, 20 nt, Artificial Sequence
  Synthetic
auauauauauauauaucucu

SEQ ID NO: 818904 - RNA, 20 nt, Artificial Sequence
  Synthetic
ugggaucugacacuaucucu

SEQ ID NO: 818905 - RNA, 20 nt, Artificial Sequence
  Synthetic
cuggggugaagaguaucucu

SEQ ID NO: 818906 - RNA, 20 nt, Artificial Sequence
  Synthetic
uuuuguacaugauuaucucu

SEQ ID NO: 818907 - RNA, 20 nt, Artificial Sequence
  Synthetic
aucccauuuauaaacucucu

SEQ ID NO: 818908 - RNA, 20 nt, Artificial Sequence
  Synthetic
cucucucucucucacucucu

SEQ ID NO: 818909 - RNA, 20 nt, Artificial Sequence
  Synthetic
ugcagcuuccucaccucucu

SEQ ID NO: 818910 - RNA, 20 nt, Artificial Sequence
  Synthetic
agcuuccacccgcccucucu

SEQ ID NO: 818911 - RNA, 20 nt, Artificial Sequence
  Synthetic
ugagugugaucugccucucu

SEQ ID NO: 818912 - RNA, 20 nt, Artificial Sequence
  Synthetic
uugcauucuuauuccucucu

SEQ ID NO: 818913 - RNA, 20 nt, Artificial Sequence
  Synthetic
cauugugucagaagcucucu

SEQ ID NO: 818914 - RNA, 20 nt, Artificial Sequence
  Synthetic
aacuacacuaucagcucucu

SEQ ID NO: 818915 - RNA, 20 nt, Artificial Sequence
  Synthetic
uuaaucaggagcugcucucu

SEQ ID NO: 818916 - RNA, 20 nt, Artificial Sequence
  Synthetic
cagggaugcugcugcucucu

SEQ ID NO: 818917 - RNA, 20 nt, Artificial Sequence
  Synthetic
agaaggcuuaauugcucucu

SEQ ID NO: 818918 - RNA, 20 nt, Artificial Sequence
  Synthetic
agguucucucagaucucucu

SEQ ID NO: 818919 - RNA, 20 nt, Artificial Sequence
  Synthetic
aucuuaucuugggucucucu

SEQ ID NO: 818920 - RNA, 20 nt, Artificial Sequence
  Synthetic
agacuuugacuggucucucu

SEQ ID NO: 818921 - RNA, 20 nt, Artificial Sequence
  Synthetic
uuuggauaaccauucucucu

SEQ ID NO: 818922 - RNA, 20 nt, Artificial Sequence
  Synthetic
ucucuagauuccuucucucu

SEQ ID NO: 818923 - RNA, 20 nt, Artificial Sequence
  Synthetic
aguuucauaaauuucucucu

SEQ ID NO: 818924 - RNA, 20 nt, Artificial Sequence
  Synthetic
uuucuaauuuuuuucucucu

SEQ ID NO: 818925 - RNA, 20 nt, Artificial Sequence
  Synthetic
aaaccauucaacaagucucu

SEQ ID NO: 818926 - RNA, 20 nt, Artificial Sequence
  Synthetic
aagccauucaacaagucucu

SEQ ID NO: 818927 - RNA, 20 nt, Artificial Sequence
  Synthetic
uuagugcauuugaagucucu

SEQ ID NO: 818928 - RNA, 20 nt, Artificial Sequence
  Synthetic
ugauuuuaaucugagucucu

SEQ ID NO: 818929 - RNA, 20 nt, Artificial Sequence
  Synthetic
ugcugagagcaguagucucu

SEQ ID NO: 818930 - RNA, 20 nt, Artificial Sequence
  Synthetic
aagucucuuuguaggucucu

SEQ ID NO: 818931 - RNA, 20 nt, Artificial Sequence
  Synthetic
uauuugauucaaaugucucu

SEQ ID NO: 818932 - RNA, 20 nt, Artificial Sequence
  Synthetic
aaucuggauuuguugucucu

SEQ ID NO: 818933 - RNA, 20 nt, Artificial Sequence
  Synthetic
uguugaugguuuuugucucu

SEQ ID NO: 818934 - RNA, 20 nt, Artificial Sequence
  Synthetic
cugccucuugaaaauucucu

SEQ ID NO: 818935 - RNA, 20 nt, Artificial Sequence
  Synthetic
ucugaccccuccaauucucu

SEQ ID NO: 818936 - RNA, 20 nt, Artificial Sequence
  Synthetic
cuuuuuccauugaauucucu

SEQ ID NO: 818937 - RNA, 20 nt, Artificial Sequence
  Synthetic
aauucauuuuuacauucucu

SEQ ID NO: 818938 - RNA, 20 nt, Artificial Sequence
  Synthetic
uucauuggauuucauucucu

SEQ ID NO: 818939 - RNA, 20 nt, Artificial Sequence
  Synthetic
auagaauuuauugauucucu

SEQ ID NO: 818940 - RNA, 20 nt, Artificial Sequence
  Synthetic
cuguacacgaaauauucucu

SEQ ID NO: 818941 - RNA, 20 nt, Artificial Sequence
  Synthetic
uugcaaauauauuauucucu

SEQ ID NO: 818942 - RNA, 20 nt, Artificial Sequence
  Synthetic
aguuggaauaguuauucucu

SEQ ID NO: 818943 - RNA, 20 nt, Artificial Sequence
  Synthetic
cccagaacugcaacuucucu

SEQ ID NO: 818944 - RNA, 20 nt, Artificial Sequence
  Synthetic
uugucuuucguaacuucucu

SEQ ID NO: 818945 - RNA, 20 nt, Artificial Sequence
  Synthetic
uaaugagaucagacuucucu

SEQ ID NO: 818946 - RNA, 20 nt, Artificial Sequence
  Synthetic
caaggggaaaugacuucucu

SEQ ID NO: 818947 - RNA, 20 nt, Artificial Sequence
  Synthetic
augcuuuuucaagcuucucu

SEQ ID NO: 818948 - RNA, 20 nt, Artificial Sequence
  Synthetic
uggauuggcauggcuucucu

SEQ ID NO: 818949 - RNA, 20 nt, Artificial Sequence
  Synthetic
cucagaucauuaucuucucu

SEQ ID NO: 818950 - RNA, 20 nt, Artificial Sequence
  Synthetic
agauaaggacucucuucucu

SEQ ID NO: 818951 - RNA, 20 nt, Artificial Sequence
  Synthetic
auuagaucacugucuucucu

SEQ ID NO: 818952 - RNA, 20 nt, Artificial Sequence
  Synthetic
cccuuacgguuuucuucucu

SEQ ID NO: 818953 - RNA, 20 nt, Artificial Sequence
  Synthetic
uguuacagguuggguucucu

SEQ ID NO: 818954 - RNA, 20 nt, Artificial Sequence
  Synthetic
uguuagauaaaauguucucu

SEQ ID NO: 818955 - RNA, 20 nt, Artificial Sequence
  Synthetic
uuguauuugugauguucucu

SEQ ID NO: 818956 - RNA, 20 nt, Artificial Sequence
  Synthetic
aguuucucaacaauuucucu

SEQ ID NO: 818957 - RNA, 20 nt, Artificial Sequence
  Synthetic
uacggcuucaacauuucucu

SEQ ID NO: 818958 - RNA, 20 nt, Artificial Sequence
  Synthetic
uuuuuuuuucacauuucucu

SEQ ID NO: 818959 - RNA, 20 nt, Artificial Sequence
  Synthetic
uuagcaacuucacuuucucu

SEQ ID NO: 818960 - RNA, 20 nt, Artificial Sequence
  Synthetic
aauuuauucuugcuuucucu

SEQ ID NO: 818961 - RNA, 20 nt, Artificial Sequence
  Synthetic
uuacauccugauguuucucu

SEQ ID NO: 818962 - RNA, 20 nt, Artificial Sequence
  Synthetic
agcugagguuauguuucucu

SEQ ID NO: 818963 - RNA, 20 nt, Artificial Sequence
  Synthetic
aaauuaacucuuguuucucu

SEQ ID NO: 818964 - RNA, 20 nt, Artificial Sequence
  Synthetic
cucauuacuauauuuucucu

SEQ ID NO: 818965 - RNA, 20 nt, Artificial Sequence
  Synthetic
augcuccuaugguuuucucu

SEQ ID NO: 818966 - RNA, 20 nt, Artificial Sequence
  Synthetic
acauaaagcauguuuucucu

SEQ ID NO: 818967 - RNA, 20 nt, Artificial Sequence
  Synthetic
uacaacugaaaaaaaagucu

SEQ ID NO: 818968 - RNA, 20 nt, Artificial Sequence
  Synthetic
uuuuacuccaggaaaagucu

SEQ ID NO: 818969 - RNA, 20 nt, Artificial Sequence
  Synthetic
ucacaaaauuggaaaagucu

SEQ ID NO: 818970 - RNA, 20 nt, Artificial Sequence
  Synthetic
uaauucccuggagaaagucu

SEQ ID NO: 818971 - RNA, 20 nt, Artificial Sequence
  Synthetic
uuguuagaacuagaaagucu

SEQ ID NO: 818972 - RNA, 20 nt, Artificial Sequence
  Synthetic
uuuuucccuuuggaaagucu

SEQ ID NO: 818973 - RNA, 20 nt, Artificial Sequence
  Synthetic
ucucuuacuaucuaaagucu

SEQ ID NO: 818974 - RNA, 20 nt, Artificial Sequence
  Synthetic
uuguaugcgcauuaaagucu

SEQ ID NO: 818975 - RNA, 20 nt, Artificial Sequence
  Synthetic
cuuuucagagaugcaagucu

SEQ ID NO: 818976 - RNA, 20 nt, Artificial Sequence
  Synthetic
uacauaugggucagaagucu

SEQ ID NO: 818977 - RNA, 20 nt, Artificial Sequence
  Synthetic
ccauauccauguugaagucu

SEQ ID NO: 818978 - RNA, 20 nt, Artificial Sequence
  Synthetic
ucccaacauaaucuaagucu

SEQ ID NO: 818979 - RNA, 20 nt, Artificial Sequence
  Synthetic
ccuccaguccaucuaagucu

SEQ ID NO: 818980 - RNA, 20 nt, Artificial Sequence
  Synthetic
uauuuugaauaauuaagucu

SEQ ID NO: 818981 - RNA, 20 nt, Artificial Sequence
  Synthetic
uugggcaauacuuuaagucu

SEQ ID NO: 818982 - RNA, 20 nt, Artificial Sequence
  Synthetic
ucaugugacacacacagucu

SEQ ID NO: 818983 - RNA, 20 nt, Artificial Sequence
  Synthetic
agaaauuggacccacagucu

SEQ ID NO: 818984 - RNA, 20 nt, Artificial Sequence
  Synthetic
cucagccaguggcacagucu

SEQ ID NO: 818985 - RNA, 20 nt, Artificial Sequence
  Synthetic
uuugaagagcuucacagucu

SEQ ID NO: 818986 - RNA, 20 nt, Artificial Sequence
  Synthetic
uuuucagauuuagacagucu

SEQ ID NO: 818987 - RNA, 20 nt, Artificial Sequence
  Synthetic
uuuuaaaaaugguacagucu

SEQ ID NO: 818988 - RNA, 20 nt, Artificial Sequence
  Synthetic
caggaguucgagaccagucu

SEQ ID NO: 818989 - RNA, 20 nt, Artificial Sequence
  Synthetic
cagaaguuugagaccagucu

SEQ ID NO: 818990 - RNA, 20 nt, Artificial Sequence
  Synthetic
cuuuagaaauuacccagucu

SEQ ID NO: 818991 - RNA, 20 nt, Artificial Sequence
  Synthetic
cuucauaaauuacccagucu

SEQ ID NO: 818992 - RNA, 20 nt, Artificial Sequence
  Synthetic
acuuauaaauuacccagucu

SEQ ID NO: 818993 - RNA, 20 nt, Artificial Sequence
  Synthetic
aaaaauacauuacccagucu

SEQ ID NO: 818994 - RNA, 20 nt, Artificial Sequence
  Synthetic
uuuuguaaauugcccagucu

SEQ ID NO: 818995 - RNA, 20 nt, Artificial Sequence
  Synthetic
agcuaacaaguggccagucu

SEQ ID NO: 818996 - RNA, 20 nt, Artificial Sequence
  Synthetic
cuguauaaauuauccagucu

SEQ ID NO: 818997 - RNA, 20 nt, Artificial Sequence
  Synthetic
augcuacuguacuccagucu

SEQ ID NO: 818998 - RNA, 20 nt, Artificial Sequence
  Synthetic
aacagagucaucuccagucu

SEQ ID NO: 818999 - RNA, 20 nt, Artificial Sequence
  Synthetic
uguuuuauauauggcagucu

SEQ ID NO: 819000 - RNA, 20 nt, Artificial Sequence
  Synthetic
acuuauauaccaugcagucu

SEQ ID NO: 819001 - RNA, 20 nt, Artificial Sequence
  Synthetic
aaaagaacaaagaucagucu

SEQ ID NO: 819002 - RNA, 20 nt, Artificial Sequence
  Synthetic
caggcguuugagaucagucu

SEQ ID NO: 819003 - RNA, 20 nt, Artificial Sequence
  Synthetic
cuguuauggugacucagucu

SEQ ID NO: 819004 - RNA, 20 nt, Artificial Sequence
  Synthetic
cuuuauaaauuauucagucu

SEQ ID NO: 819005 - RNA, 20 nt, Artificial Sequence
  Synthetic
aggcuguuuuccaagagucu

SEQ ID NO: 819006 - RNA, 20 nt, Artificial Sequence
  Synthetic
auacuauuccucaagagucu

SEQ ID NO: 819007 - RNA, 20 nt, Artificial Sequence
  Synthetic
agacugaaauuccagagucu

SEQ ID NO: 819008 - RNA, 20 nt, Artificial Sequence
  Synthetic
cugcagagaagggagagucu

SEQ ID NO: 819009 - RNA, 20 nt, Artificial Sequence
  Synthetic
aacugccuaaaguagagucu

SEQ ID NO: 819010 - RNA, 20 nt, Artificial Sequence
  Synthetic
aaaauauuuaguuagagucu

SEQ ID NO: 819011 - RNA, 20 nt, Artificial Sequence
  Synthetic
uaaucaaaagccaggagucu

SEQ ID NO: 819012 - RNA, 20 nt, Artificial Sequence
  Synthetic
uucuuacuuucuaggagucu

SEQ ID NO: 819013 - RNA, 20 nt, Artificial Sequence
  Synthetic
aagaugaaaacagggagucu

SEQ ID NO: 819014 - RNA, 20 nt, Artificial Sequence
  Synthetic
cagacauccacugggagucu

SEQ ID NO: 819015 - RNA, 20 nt, Artificial Sequence
  Synthetic
uggcuccaagccuggagucu

SEQ ID NO: 819016 - RNA, 20 nt, Artificial Sequence
  Synthetic
cuuucauucagcuggagucu

SEQ ID NO: 819017 - RNA, 20 nt, Artificial Sequence
  Synthetic
ugcuucuuuucaaugagucu

SEQ ID NO: 819018 - RNA, 20 nt, Artificial Sequence
  Synthetic
ccugucuaccagcugagucu

SEQ ID NO: 819019 - RNA, 20 nt, Artificial Sequence
  Synthetic
caagugagagacuugagucu

SEQ ID NO: 819020 - RNA, 20 nt, Artificial Sequence
  Synthetic
agaaucaaauauaauagucu

SEQ ID NO: 819021 - RNA, 20 nt, Artificial Sequence
  Synthetic
ugaauuccuuaggauagucu

SEQ ID NO: 819022 - RNA, 20 nt, Artificial Sequence
  Synthetic
aaguacuggauuuauagucu

SEQ ID NO: 819023 - RNA, 20 nt, Artificial Sequence
  Synthetic
acugaugcaaugucuagucu

SEQ ID NO: 819024 - RNA, 20 nt, Artificial Sequence
  Synthetic
acauuauuucauaguagucu

SEQ ID NO: 819025 - RNA, 20 nt, Artificial Sequence
  Synthetic
uuaauaaauuuacuuagucu

SEQ ID NO: 819026 - RNA, 20 nt, Artificial Sequence
  Synthetic
cuuugacuagcaguuagucu

SEQ ID NO: 819027 - RNA, 20 nt, Artificial Sequence
  Synthetic
acuucuuccugguuuagucu

SEQ ID NO: 819028 - RNA, 20 nt, Artificial Sequence
  Synthetic
auuucuuccugguuuagucu

SEQ ID NO: 819029 - RNA, 20 nt, Artificial Sequence
  Synthetic
accucgugauccgcccgucu

SEQ ID NO: 819030 - RNA, 20 nt, Artificial Sequence
  Synthetic
auuauacacuagguucgucu

SEQ ID NO: 819031 - RNA, 20 nt, Artificial Sequence
  Synthetic
cugauuucuccaaaaggucu

SEQ ID NO: 819032 - RNA, 20 nt, Artificial Sequence
  Synthetic
aauagaugcagaaaaggucu

SEQ ID NO: 819033 - RNA, 20 nt, Artificial Sequence
  Synthetic
aaagugcucugugcaggucu

SEQ ID NO: 819034 - RNA, 20 nt, Artificial Sequence
  Synthetic
ccaacaacggcuucaggucu

SEQ ID NO: 819035 - RNA, 20 nt, Artificial Sequence
  Synthetic
uaucuauucccaagaggucu

SEQ ID NO: 819036 - RNA, 20 nt, Artificial Sequence
  Synthetic
caucacagacccagaggucu

SEQ ID NO: 819037 - RNA, 20 nt, Artificial Sequence
  Synthetic
cauggugauuuuggaggucu

SEQ ID NO: 819038 - RNA, 20 nt, Artificial Sequence
  Synthetic
ccagcuagggcaugaggucu

SEQ ID NO: 819039 - RNA, 20 nt, Artificial Sequence
  Synthetic
cuuuauaaauuacccggucu

SEQ ID NO: 819040 - RNA, 20 nt, Artificial Sequence
  Synthetic
uuaacauggaugccgggucu

SEQ ID NO: 819041 - RNA, 20 nt, Artificial Sequence
  Synthetic
cccaagaggucugggggucu

SEQ ID NO: 819042 - RNA, 20 nt, Artificial Sequence
  Synthetic
aaggaauaaaaguggggucu

SEQ ID NO: 819043 - RNA, 20 nt, Artificial Sequence
  Synthetic
uaaaacagagauuugggucu

SEQ ID NO: 819044 - RNA, 20 nt, Artificial Sequence
  Synthetic
auuugcaagccacauggucu

SEQ ID NO: 819045 - RNA, 20 nt, Artificial Sequence
  Synthetic
cguguuagccaggauggucu

SEQ ID NO: 819046 - RNA, 20 nt, Artificial Sequence
  Synthetic
uuuucccacaaguauggucu

SEQ ID NO: 819047 - RNA, 20 nt, Artificial Sequence
  Synthetic
uaguugaaaaucacuggucu

SEQ ID NO: 819048 - RNA, 20 nt, Artificial Sequence
  Synthetic
ugagccaccccaccuggucu

SEQ ID NO: 819049 - RNA, 20 nt, Artificial Sequence
  Synthetic
uccucauaccauccuggucu

SEQ ID NO: 819050 - RNA, 20 nt, Artificial Sequence
  Synthetic
uguguuacccaggcuggucu

SEQ ID NO: 819051 - RNA, 20 nt, Artificial Sequence
  Synthetic
cauguuggccaggcuggucu

SEQ ID NO: 819052 - RNA, 20 nt, Artificial Sequence
  Synthetic
cuuaauaaauuuucuggucu

SEQ ID NO: 819053 - RNA, 20 nt, Artificial Sequence
  Synthetic
uauuuccuuaaauguggucu

SEQ ID NO: 819054 - RNA, 20 nt, Artificial Sequence
  Synthetic
uuauaaccuguuuguggucu

SEQ ID NO: 819055 - RNA, 20 nt, Artificial Sequence
  Synthetic
auauccugguuauuuggucu

SEQ ID NO: 819056 - RNA, 20 nt, Artificial Sequence
  Synthetic
ucaaagaauguaaaaugucu

SEQ ID NO: 819057 - RNA, 20 nt, Artificial Sequence
  Synthetic
uaauguuugaccaaaugucu

SEQ ID NO: 819058 - RNA, 20 nt, Artificial Sequence
  Synthetic
agauacaguuagaaaugucu

SEQ ID NO: 819059 - RNA, 20 nt, Artificial Sequence
  Synthetic
agggacauuuggaaaugucu

SEQ ID NO: 819060 - RNA, 20 nt, Artificial Sequence
  Synthetic
uauggaaucuguaaaugucu

SEQ ID NO: 819061 - RNA, 20 nt, Artificial Sequence
  Synthetic
uaauggaauuuuaaaugucu

SEQ ID NO: 819062 - RNA, 20 nt, Artificial Sequence
  Synthetic
auuuagcauuuuaaaugucu

SEQ ID NO: 819063 - RNA, 20 nt, Artificial Sequence
  Synthetic
accaaaaagaaagaaugucu

SEQ ID NO: 819064 - RNA, 20 nt, Artificial Sequence
  Synthetic
uuuaaaaacuacgaaugucu

SEQ ID NO: 819065 - RNA, 20 nt, Artificial Sequence
  Synthetic
uuggcauuuagugaaugucu

SEQ ID NO: 819066 - RNA, 20 nt, Artificial Sequence
  Synthetic
aaacacaauguaucaugucu

SEQ ID NO: 819067 - RNA, 20 nt, Artificial Sequence
  Synthetic
cuuucaguuauaagaugucu

SEQ ID NO: 819068 - RNA, 20 nt, Artificial Sequence
  Synthetic
aagaaucaugaaggaugucu

SEQ ID NO: 819069 - RNA, 20 nt, Artificial Sequence
  Synthetic
auuuuaaaauacugaugucu

SEQ ID NO: 819070 - RNA, 20 nt, Artificial Sequence
  Synthetic
aaauugacccagugaugucu

SEQ ID NO: 819071 - RNA, 20 nt, Artificial Sequence
  Synthetic
uggauuguuaguugaugucu

SEQ ID NO: 819072 - RNA, 20 nt, Artificial Sequence
  Synthetic
uaaguagcacagcuaugucu

SEQ ID NO: 819073 - RNA, 20 nt, Artificial Sequence
  Synthetic
acaaauggugcauuaugucu

SEQ ID NO: 819074 - RNA, 20 nt, Artificial Sequence
  Synthetic
cagguccaagggaacugucu

SEQ ID NO: 819075 - RNA, 20 nt, Artificial Sequence
  Synthetic
uucacauucuaucacugucu

SEQ ID NO: 819076 - RNA, 20 nt, Artificial Sequence
  Synthetic
ugcaccauuuuauacugucu

SEQ ID NO: 819077 - RNA, 20 nt, Artificial Sequence
  Synthetic
aacauauauauccccugucu

SEQ ID NO: 819078 - RNA, 20 nt, Artificial Sequence
  Synthetic
accucgugaucugccugucu

SEQ ID NO: 819079 - RNA, 20 nt, Artificial Sequence
  Synthetic
ugucccauuuuauccugucu

SEQ ID NO: 819080 - RNA, 20 nt, Artificial Sequence
  Synthetic
aaaaauguucccuccugucu

SEQ ID NO: 819081 - RNA, 20 nt, Artificial Sequence
  Synthetic
acccuugggucuggcugucu

SEQ ID NO: 819082 - RNA, 20 nt, Artificial Sequence
  Synthetic
acucuccaggauaucugucu

SEQ ID NO: 819083 - RNA, 20 nt, Artificial Sequence
  Synthetic
ucccccuucucucucugucu

SEQ ID NO: 819084 - RNA, 20 nt, Artificial Sequence
  Synthetic
cuuugguugagcuucugucu

SEQ ID NO: 819085 - RNA, 20 nt, Artificial Sequence
  Synthetic
uuccagcuuucccagugucu

SEQ ID NO: 819086 - RNA, 20 nt, Artificial Sequence
  Synthetic
uuauuaauaacucagugucu

SEQ ID NO: 819087 - RNA, 20 nt, Artificial Sequence
  Synthetic
aagaaugacacuuagugucu

SEQ ID NO: 819088 - RNA, 20 nt, Artificial Sequence
  Synthetic
cauucguauucugggugucu

SEQ ID NO: 819089 - RNA, 20 nt, Artificial Sequence
  Synthetic
ucuaaauuccucuggugucu

SEQ ID NO: 819090 - RNA, 20 nt, Artificial Sequence
  Synthetic
aaagucauccuguggugucu

SEQ ID NO: 819091 - RNA, 20 nt, Artificial Sequence
  Synthetic
uaccagcagauuuggugucu

SEQ ID NO: 819092 - RNA, 20 nt, Artificial Sequence
  Synthetic
aaagccuugccaaugugucu

SEQ ID NO: 819093 - RNA, 20 nt, Artificial Sequence
  Synthetic
uugguagguuguaugugucu

SEQ ID NO: 819094 - RNA, 20 nt, Artificial Sequence
  Synthetic
aaucugacaauuaugugucu

SEQ ID NO: 819095 - RNA, 20 nt, Artificial Sequence
  Synthetic
aauccgauuauuaugugucu

SEQ ID NO: 819096 - RNA, 20 nt, Artificial Sequence
  Synthetic
ccucagccuccagugugucu

SEQ ID NO: 819097 - RNA, 20 nt, Artificial Sequence
  Synthetic
acagauuucuaaaauugucu

SEQ ID NO: 819098 - RNA, 20 nt, Artificial Sequence
  Synthetic
agugguuaagcacauugucu

SEQ ID NO: 819099 - RNA, 20 nt, Artificial Sequence
  Synthetic
agacaucuuccccauugucu

SEQ ID NO: 819100 - RNA, 20 nt, Artificial Sequence
  Synthetic
aggcauuuuucccauugucu

SEQ ID NO: 819101 - RNA, 20 nt, Artificial Sequence
  Synthetic
aacacagccaaagauugucu

SEQ ID NO: 819102 - RNA, 20 nt, Artificial Sequence
  Synthetic
caaacaugcacagauugucu

SEQ ID NO: 819103 - RNA, 20 nt, Artificial Sequence
  Synthetic
cuuuuggcucaggauugucu

SEQ ID NO: 819104 - RNA, 20 nt, Artificial Sequence
  Synthetic
cauuuuacuuaggauugucu

SEQ ID NO: 819105 - RNA, 20 nt, Artificial Sequence
  Synthetic
agagcuaacguaacuugucu

SEQ ID NO: 819106 - RNA, 20 nt, Artificial Sequence
  Synthetic
aaagagaaaacuacuugucu

SEQ ID NO: 819107 - RNA, 20 nt, Artificial Sequence
  Synthetic
cgauuugcuccugcuugucu

SEQ ID NO: 819108 - RNA, 20 nt, Artificial Sequence
  Synthetic
ucaguuaacuuaucuugucu

SEQ ID NO: 819109 - RNA, 20 nt, Artificial Sequence
  Synthetic
cugccucacuuuucuugucu

SEQ ID NO: 819110 - RNA, 20 nt, Artificial Sequence
  Synthetic
cauuuucucagcaguugucu

SEQ ID NO: 819111 - RNA, 20 nt, Artificial Sequence
  Synthetic
agaaguuaaacaauuugucu

SEQ ID NO: 819112 - RNA, 20 nt, Artificial Sequence
  Synthetic
uuguuuuagcugauuugucu

SEQ ID NO: 819113 - RNA, 20 nt, Artificial Sequence
  Synthetic
aggaaugaauaaguuugucu

SEQ ID NO: 819114 - RNA, 20 nt, Artificial Sequence
  Synthetic
agguacagacuuguuugucu

SEQ ID NO: 819115 - RNA, 20 nt, Artificial Sequence
  Synthetic
uauauuucuugcuuuugucu

SEQ ID NO: 819116 - RNA, 20 nt, Artificial Sequence
  Synthetic
aauguaaaaacaaaaauucu

SEQ ID NO: 819117 - RNA, 20 nt, Artificial Sequence
  Synthetic
uagcaccuaugcaaaauucu

SEQ ID NO: 819118 - RNA, 20 nt, Artificial Sequence
  Synthetic
cagagauuuuggaaaauucu

SEQ ID NO: 819119 - RNA, 20 nt, Artificial Sequence
  Synthetic
aaaaauuguaguaaaauucu

SEQ ID NO: 819120 - RNA, 20 nt, Artificial Sequence
  Synthetic
acaguaucucaagaaauucu

SEQ ID NO: 819121 - RNA, 20 nt, Artificial Sequence
  Synthetic
ccuacugaaacagaaauucu

SEQ ID NO: 819122 - RNA, 20 nt, Artificial Sequence
  Synthetic
ucaaaugaaucagaaauucu

SEQ ID NO: 819123 - RNA, 20 nt, Artificial Sequence
  Synthetic
uuggcuggauaugaaauucu

SEQ ID NO: 819124 - RNA, 20 nt, Artificial Sequence
  Synthetic
uguaucuauucugaaauucu

SEQ ID NO: 819125 - RNA, 20 nt, Artificial Sequence
  Synthetic
cauaguuuaugugaaauucu

SEQ ID NO: 819126 - RNA, 20 nt, Artificial Sequence
  Synthetic
ugaaagaaccaauaaauucu

SEQ ID NO: 819127 - RNA, 20 nt, Artificial Sequence
  Synthetic
ucuccaagauccacaauucu

SEQ ID NO: 819128 - RNA, 20 nt, Artificial Sequence
  Synthetic
ugaaaggugcagucaauucu

SEQ ID NO: 819129 - RNA, 20 nt, Artificial Sequence
  Synthetic
uuuguuuuaugcggaauucu

SEQ ID NO: 819130 - RNA, 20 nt, Artificial Sequence
  Synthetic
uagacuuagaauggaauucu

SEQ ID NO: 819131 - RNA, 20 nt, Artificial Sequence
  Synthetic
auaucaaacuccugaauucu

SEQ ID NO: 819132 - RNA, 20 nt, Artificial Sequence
  Synthetic
ccauacauccucugaauucu

SEQ ID NO: 819133 - RNA, 20 nt, Artificial Sequence
  Synthetic
uugauuccccuccuaauucu

SEQ ID NO: 819134 - RNA, 20 nt, Artificial Sequence
  Synthetic
uauuuuuauuugcuaauucu

SEQ ID NO: 819135 - RNA, 20 nt, Artificial Sequence
  Synthetic
uggaucaguauucuaauucu

SEQ ID NO: 819136 - RNA, 20 nt, Artificial Sequence
  Synthetic
acuuugaaaugaguaauucu

SEQ ID NO: 819137 - RNA, 20 nt, Artificial Sequence
  Synthetic
auuauacgggauguaauucu

SEQ ID NO: 819138 - RNA, 20 nt, Artificial Sequence
  Synthetic
cacauuuuaccuaacauucu

SEQ ID NO: 819139 - RNA, 20 nt, Artificial Sequence
  Synthetic
cauuuuggacaacacauucu

SEQ ID NO: 819140 - RNA, 20 nt, Artificial Sequence
  Synthetic
acugacaacuuucacauucu

SEQ ID NO: 819141 - RNA, 20 nt, Artificial Sequence
  Synthetic
aaaagcuguaccuacauucu

SEQ ID NO: 819142 - RNA, 20 nt, Artificial Sequence
  Synthetic
auuauuauacuuuacauucu

SEQ ID NO: 819143 - RNA, 20 nt, Artificial Sequence
  Synthetic
cuugaucugggcaccauucu

SEQ ID NO: 819144 - RNA, 20 nt, Artificial Sequence
  Synthetic
ugucuaugaaaacccauucu

SEQ ID NO: 819145 - RNA, 20 nt, Artificial Sequence
  Synthetic
uuggcuuaaugagccauucu

SEQ ID NO: 819146 - RNA, 20 nt, Artificial Sequence
  Synthetic
acguuuuguuucuccauucu

SEQ ID NO: 819147 - RNA, 20 nt, Artificial Sequence
  Synthetic
aagguagaaacaagcauucu

SEQ ID NO: 819148 - RNA, 20 nt, Artificial Sequence
  Synthetic
uguaccagaugaugcauucu

SEQ ID NO: 819149 - RNA, 20 nt, Artificial Sequence
  Synthetic
ugaucuaugugucucauucu

SEQ ID NO: 819150 - RNA, 20 nt, Artificial Sequence
  Synthetic
acuaaauaauaauucauucu

SEQ ID NO: 819151 - RNA, 20 nt, Artificial Sequence
  Synthetic
auagaacauuaauucauucu

SEQ ID NO: 819152 - RNA, 20 nt, Artificial Sequence
  Synthetic
aguuaaaccauauucauucu

SEQ ID NO: 819153 - RNA, 20 nt, Artificial Sequence
  Synthetic
cuucuccucucccagauucu

SEQ ID NO: 819154 - RNA, 20 nt, Artificial Sequence
  Synthetic
aaucagggcauucagauucu

SEQ ID NO: 819155 - RNA, 20 nt, Artificial Sequence
  Synthetic
uaauguuguugauagauucu

SEQ ID NO: 819156 - RNA, 20 nt, Artificial Sequence
  Synthetic
ccuccuguguguuagauucu

SEQ ID NO: 819157 - RNA, 20 nt, Artificial Sequence
  Synthetic
auuuuuauugaaacgauucu

SEQ ID NO: 819158 - RNA, 20 nt, Artificial Sequence
  Synthetic
aagcaacuccugacgauucu

SEQ ID NO: 819159 - RNA, 20 nt, Artificial Sequence
  Synthetic
acuucuauuuuagcgauucu

SEQ ID NO: 819160 - RNA, 20 nt, Artificial Sequence
  Synthetic
ccuugaaugaagaggauucu

SEQ ID NO: 819161 - RNA, 20 nt, Artificial Sequence
  Synthetic
augagagguacauggauucu

SEQ ID NO: 819162 - RNA, 20 nt, Artificial Sequence
  Synthetic
auguaugcccucuggauucu

SEQ ID NO: 819163 - RNA, 20 nt, Artificial Sequence
  Synthetic
cugccucccaggaugauucu

SEQ ID NO: 819164 - RNA, 20 nt, Artificial Sequence
  Synthetic
acgcaaaucucuaugauucu

SEQ ID NO: 819165 - RNA, 20 nt, Artificial Sequence
  Synthetic
ugucccauuuuacugauucu

SEQ ID NO: 819166 - RNA, 20 nt, Artificial Sequence
  Synthetic
uuucuuugggcagugauucu

SEQ ID NO: 819167 - RNA, 20 nt, Artificial Sequence
  Synthetic
cuauauucuauagugauucu

SEQ ID NO: 819168 - RNA, 20 nt, Artificial Sequence
  Synthetic
ugaguuuaaaucgugauucu

SEQ ID NO: 819169 - RNA, 20 nt, Artificial Sequence
  Synthetic
cuauuacuugguuugauucu

SEQ ID NO: 819170 - RNA, 20 nt, Artificial Sequence
  Synthetic
agucuuuuccuuuugauucu

SEQ ID NO: 819171 - RNA, 20 nt, Artificial Sequence
  Synthetic
aaaaaaugauaaaauauucu

SEQ ID NO: 819172 - RNA, 20 nt, Artificial Sequence
  Synthetic
ccccaaagcaggaauauucu

SEQ ID NO: 819173 - RNA, 20 nt, Artificial Sequence
  Synthetic
acaaguucagggaauauucu

SEQ ID NO: 819174 - RNA, 20 nt, Artificial Sequence
  Synthetic
uacuuccacuguaauauucu

SEQ ID NO: 819175 - RNA, 20 nt, Artificial Sequence
  Synthetic
aucagcuucaaacauauucu

SEQ ID NO: 819176 - RNA, 20 nt, Artificial Sequence
  Synthetic
aagugucugauccauauucu

SEQ ID NO: 819177 - RNA, 20 nt, Artificial Sequence
  Synthetic
auuccaaauaggcauauucu

SEQ ID NO: 819178 - RNA, 20 nt, Artificial Sequence
  Synthetic
aucacaugaagucauauucu

SEQ ID NO: 819179 - RNA, 20 nt, Artificial Sequence
  Synthetic
acaggggcucuucauauucu

SEQ ID NO: 819180 - RNA, 20 nt, Artificial Sequence
  Synthetic
uauucugacuuucauauucu

SEQ ID NO: 819181 - RNA, 20 nt, Artificial Sequence
  Synthetic
ccucauaaagcuuauauucu

SEQ ID NO: 819182 - RNA, 20 nt, Artificial Sequence
  Synthetic
acuuugcauucuuauauucu

SEQ ID NO: 819183 - RNA, 20 nt, Artificial Sequence
  Synthetic
ucagcacuaggcacuauucu

SEQ ID NO: 819184 - RNA, 20 nt, Artificial Sequence
  Synthetic
ucagcauuucugacuauucu

SEQ ID NO: 819185 - RNA, 20 nt, Artificial Sequence
  Synthetic
acacaccuacauccuauucu

SEQ ID NO: 819186 - RNA, 20 nt, Artificial Sequence
  Synthetic
uguguuuguaaagcuauucu

SEQ ID NO: 819187 - RNA, 20 nt, Artificial Sequence
  Synthetic
uucuuucaagaagcuauucu

SEQ ID NO: 819188 - RNA, 20 nt, Artificial Sequence
  Synthetic
agaaaggcuuuagcuauucu

SEQ ID NO: 819189 - RNA, 20 nt, Artificial Sequence
  Synthetic
ucugggcacccaucuauucu

SEQ ID NO: 819190 - RNA, 20 nt, Artificial Sequence
  Synthetic
uuaucaucugugucuauucu

SEQ ID NO: 819191 - RNA, 20 nt, Artificial Sequence
  Synthetic
cuuguuucaccuucuauucu

SEQ ID NO: 819192 - RNA, 20 nt, Artificial Sequence
  Synthetic
aacaaucagauuucuauucu

SEQ ID NO: 819193 - RNA, 20 nt, Artificial Sequence
  Synthetic
ccuuaaaaagaaaguauucu

SEQ ID NO: 819194 - RNA, 20 nt, Artificial Sequence
  Synthetic
aucaaaaggaacaguauucu

SEQ ID NO: 819195 - RNA, 20 nt, Artificial Sequence
  Synthetic
cuuuucuucuggaguauucu

SEQ ID NO: 819196 - RNA, 20 nt, Artificial Sequence
  Synthetic
caguaucucauucguauucu

SEQ ID NO: 819197 - RNA, 20 nt, Artificial Sequence
  Synthetic
uucagcauuugguguauucu

SEQ ID NO: 819198 - RNA, 20 nt, Artificial Sequence
  Synthetic
cuuucccaguuguguauucu

SEQ ID NO: 819199 - RNA, 20 nt, Artificial Sequence
  Synthetic
uugccauucucuuguauucu

SEQ ID NO: 819200 - RNA, 20 nt, Artificial Sequence
  Synthetic
acauaucacagaauuauucu

SEQ ID NO: 819201 - RNA, 20 nt, Artificial Sequence
  Synthetic
uacugaguuuuaauuauucu

SEQ ID NO: 819202 - RNA, 20 nt, Artificial Sequence
  Synthetic
auuuggucaaacauuauucu

SEQ ID NO: 819203 - RNA, 20 nt, Artificial Sequence
  Synthetic
aaauggacagaucuuauucu

SEQ ID NO: 819204 - RNA, 20 nt, Artificial Sequence
  Synthetic
ugaaauaaauagguuauucu

SEQ ID NO: 819205 - RNA, 20 nt, Artificial Sequence
  Synthetic
aguauccguuagguuauucu

SEQ ID NO: 819206 - RNA, 20 nt, Artificial Sequence
  Synthetic
caaaaaugaaguguuauucu

SEQ ID NO: 819207 - RNA, 20 nt, Artificial Sequence
  Synthetic
agccauauaggauuuauucu

SEQ ID NO: 819208 - RNA, 20 nt, Artificial Sequence
  Synthetic
aauacauuugacuuuauucu

SEQ ID NO: 819209 - RNA, 20 nt, Artificial Sequence
  Synthetic
ucucccuugcucuuuauucu

SEQ ID NO: 819210 - RNA, 20 nt, Artificial Sequence
  Synthetic
aaguuuaaauucuuuauucu

SEQ ID NO: 819211 - RNA, 20 nt, Artificial Sequence
  Synthetic
aaacaggauaauuuuauucu

SEQ ID NO: 819212 - RNA, 20 nt, Artificial Sequence
  Synthetic
uauuucccagauuuuauucu

SEQ ID NO: 819213 - RNA, 20 nt, Artificial Sequence
  Synthetic
ucuuucuaaacuuuuauucu

SEQ ID NO: 819214 - RNA, 20 nt, Artificial Sequence
  Synthetic
aauaaauuaaaaaaacuucu

SEQ ID NO: 819215 - RNA, 20 nt, Artificial Sequence
  Synthetic
cacaacauagaaaaacuucu

SEQ ID NO: 819216 - RNA, 20 nt, Artificial Sequence
  Synthetic
aauagcaaggaaaaacuucu

SEQ ID NO: 819217 - RNA, 20 nt, Artificial Sequence
  Synthetic
caggcuagacucaaacuucu

SEQ ID NO: 819218 - RNA, 20 nt, Artificial Sequence
  Synthetic
cagacuggucucaaacuucu

SEQ ID NO: 819219 - RNA, 20 nt, Artificial Sequence
  Synthetic
aacacuuccuuuaaacuucu

SEQ ID NO: 819220 - RNA, 20 nt, Artificial Sequence
  Synthetic
uuaaauguaaaccaacuucu

SEQ ID NO: 819221 - RNA, 20 nt, Artificial Sequence
  Synthetic
uaaucucugauucaacuucu

SEQ ID NO: 819222 - RNA, 20 nt, Artificial Sequence
  Synthetic
agcuuagcuaaggaacuucu

SEQ ID NO: 819223 - RNA, 20 nt, Artificial Sequence
  Synthetic
cugagauuuaucacacuucu

SEQ ID NO: 819224 - RNA, 20 nt, Artificial Sequence
  Synthetic
uaaugucaaauaucacuucu

SEQ ID NO: 819225 - RNA, 20 nt, Artificial Sequence
  Synthetic
aaaaaaaaaaaaagacuucu

SEQ ID NO: 819226 - RNA, 20 nt, Artificial Sequence
  Synthetic
cucaccacaauaagacuucu

SEQ ID NO: 819227 - RNA, 20 nt, Artificial Sequence
  Synthetic
cucaccaccauaagacuucu

SEQ ID NO: 819228 - RNA, 20 nt, Artificial Sequence
  Synthetic
agcccauguaugagacuucu

SEQ ID NO: 819229 - RNA, 20 nt, Artificial Sequence
  Synthetic
ugucuggguacaugacuucu

SEQ ID NO: 819230 - RNA, 20 nt, Artificial Sequence
  Synthetic
caccauucugugugacuucu

SEQ ID NO: 819231 - RNA, 20 nt, Artificial Sequence
  Synthetic
uacgcagcaggcauacuucu

SEQ ID NO: 819232 - RNA, 20 nt, Artificial Sequence
  Synthetic
uggguuggagcucuacuucu

SEQ ID NO: 819233 - RNA, 20 nt, Artificial Sequence
  Synthetic
augccccaaacauuacuucu

SEQ ID NO: 819234 - RNA, 20 nt, Artificial Sequence
  Synthetic
aagauaauguuauuacuucu

SEQ ID NO: 819235 - RNA, 20 nt, Artificial Sequence
  Synthetic
cucccucuuuucuaccuucu

SEQ ID NO: 819236 - RNA, 20 nt, Artificial Sequence
  Synthetic
acacacaucuuuuaccuucu

SEQ ID NO: 819237 - RNA, 20 nt, Artificial Sequence
  Synthetic
uauguuccuucuacccuucu

SEQ ID NO: 819238 - RNA, 20 nt, Artificial Sequence
  Synthetic
cuucagacaaggccccuucu

SEQ ID NO: 819239 - RNA, 20 nt, Artificial Sequence
  Synthetic
ccacgugacaaagcccuucu

SEQ ID NO: 819240 - RNA, 20 nt, Artificial Sequence
  Synthetic
aauuuuccccacucccuucu

SEQ ID NO: 819241 - RNA, 20 nt, Artificial Sequence
  Synthetic
uccuagggacauggccuucu

SEQ ID NO: 819242 - RNA, 20 nt, Artificial Sequence
  Synthetic
uauaauggccuuggccuucu

SEQ ID NO: 819243 - RNA, 20 nt, Artificial Sequence
  Synthetic
ucuucuccccacugccuucu

SEQ ID NO: 819244 - RNA, 20 nt, Artificial Sequence
  Synthetic
uauauuuccuucugccuucu

SEQ ID NO: 819245 - RNA, 20 nt, Artificial Sequence
  Synthetic
aaugucuaaguuugccuucu

SEQ ID NO: 819246 - RNA, 20 nt, Artificial Sequence
  Synthetic
uauuaaaucccuauccuucu

SEQ ID NO: 819247 - RNA, 20 nt, Artificial Sequence
  Synthetic
cugaaauauuaccuccuucu

SEQ ID NO: 819248 - RNA, 20 nt, Artificial Sequence
  Synthetic
uucauggucauccuccuucu

SEQ ID NO: 819249 - RNA, 20 nt, Artificial Sequence
  Synthetic
uaauauggaagauuccuucu

SEQ ID NO: 819250 - RNA, 20 nt, Artificial Sequence
  Synthetic
ccugucuucaauuuccuucu

SEQ ID NO: 819251 - RNA, 20 nt, Artificial Sequence
  Synthetic
uaaaaucaguauuuccuucu

SEQ ID NO: 819252 - RNA, 20 nt, Artificial Sequence
  Synthetic
agaaagacaaguuuccuucu

SEQ ID NO: 819253 - RNA, 20 nt, Artificial Sequence
  Synthetic
agaggaugcuuuuuccuucu

SEQ ID NO: 819254 - RNA, 20 nt, Artificial Sequence
  Synthetic
augccuacagcccagcuucu

SEQ ID NO: 819255 - RNA, 20 nt, Artificial Sequence
  Synthetic
ccagcaucuacucagcuucu

SEQ ID NO: 819256 - RNA, 20 nt, Artificial Sequence
  Synthetic
cugggaugcauaaggcuucu

SEQ ID NO: 819257 - RNA, 20 nt, Artificial Sequence
  Synthetic
aaaggaucacacuggcuucu

SEQ ID NO: 819258 - RNA, 20 nt, Artificial Sequence
  Synthetic
ucccacuuaagcaugcuucu

SEQ ID NO: 819259 - RNA, 20 nt, Artificial Sequence
  Synthetic
ugccucuccagacugcuucu

SEQ ID NO: 819260 - RNA, 20 nt, Artificial Sequence
  Synthetic
aaaauuacacuacugcuucu

SEQ ID NO: 819261 - RNA, 20 nt, Artificial Sequence
  Synthetic
aaccucaggugguugcuucu

SEQ ID NO: 819262 - RNA, 20 nt, Artificial Sequence
  Synthetic
aacuaguaauacuaucuucu

SEQ ID NO: 819263 - RNA, 20 nt, Artificial Sequence
  Synthetic
uaaugccuagguuaucuucu

SEQ ID NO: 819264 - RNA, 20 nt, Artificial Sequence
  Synthetic
uauguacuaggcacucuucu

SEQ ID NO: 819265 - RNA, 20 nt, Artificial Sequence
  Synthetic
agaaaacagcauccucuucu

SEQ ID NO: 819266 - RNA, 20 nt, Artificial Sequence
  Synthetic
cuaucuggauauccucuucu

SEQ ID NO: 819267 - RNA, 20 nt, Artificial Sequence
  Synthetic
cacuugcauuuuccucuucu

SEQ ID NO: 819268 - RNA, 20 nt, Artificial Sequence
  Synthetic
uaguucaacuccucucuucu

SEQ ID NO: 819269 - RNA, 20 nt, Artificial Sequence
  Synthetic
aauaguucucuuucucuucu

SEQ ID NO: 819270 - RNA, 20 nt, Artificial Sequence
  Synthetic
cuuacacaauuuucucuucu

SEQ ID NO: 819271 - RNA, 20 nt, Artificial Sequence
  Synthetic
ucaaauuuguuaauucuucu

SEQ ID NO: 819272 - RNA, 20 nt, Artificial Sequence
  Synthetic
uuccaauguauucuucuucu

SEQ ID NO: 819273 - RNA, 20 nt, Artificial Sequence
  Synthetic
uugaaagcaacuguucuucu

SEQ ID NO: 819274 - RNA, 20 nt, Artificial Sequence
  Synthetic
uuaaagagcugauuucuucu

SEQ ID NO: 819275 - RNA, 20 nt, Artificial Sequence
  Synthetic
uaaacacacuuauuucuucu

SEQ ID NO: 819276 - RNA, 20 nt, Artificial Sequence
  Synthetic
cuuuaauagcaguuucuucu

SEQ ID NO: 819277 - RNA, 20 nt, Artificial Sequence
  Synthetic
uaaugccuagguuuucuucu

SEQ ID NO: 819278 - RNA, 20 nt, Artificial Sequence
  Synthetic
uauugccuagguuuucuucu

SEQ ID NO: 819279 - RNA, 20 nt, Artificial Sequence
  Synthetic
auauauauacuugaaguucu

SEQ ID NO: 819280 - RNA, 20 nt, Artificial Sequence
  Synthetic
uuuaauuauacuuaaguucu

SEQ ID NO: 819281 - RNA, 20 nt, Artificial Sequence
  Synthetic
uacaugaguacuuaaguucu

SEQ ID NO: 819282 - RNA, 20 nt, Artificial Sequence
  Synthetic
uaaauuauacuuuaaguucu

SEQ ID NO: 819283 - RNA, 20 nt, Artificial Sequence
  Synthetic
uuaauuauacuuuaaguucu

SEQ ID NO: 819284 - RNA, 20 nt, Artificial Sequence
  Synthetic
uuuauuauacuuuaaguucu

SEQ ID NO: 819285 - RNA, 20 nt, Artificial Sequence
  Synthetic
uuaauuuuacuuuaaguucu

SEQ ID NO: 819286 - RNA, 20 nt, Artificial Sequence
  Synthetic
uuuuuuaaauuuuaaguucu

SEQ ID NO: 819287 - RNA, 20 nt, Artificial Sequence
  Synthetic
cuuuagccucccacaguucu

SEQ ID NO: 819288 - RNA, 20 nt, Artificial Sequence
  Synthetic
accugucaaaggacaguucu

SEQ ID NO: 819289 - RNA, 20 nt, Artificial Sequence
  Synthetic
agucuuaagccuccaguucu

SEQ ID NO: 819290 - RNA, 20 nt, Artificial Sequence
  Synthetic
agugcuaaaauuccaguucu

SEQ ID NO: 819291 - RNA, 20 nt, Artificial Sequence
  Synthetic
ccaagagaaguugcaguucu

SEQ ID NO: 819292 - RNA, 20 nt, Artificial Sequence
  Synthetic
ucagggaagccaucaguucu

SEQ ID NO: 819293 - RNA, 20 nt, Artificial Sequence
  Synthetic
ugggagaaacccucaguucu

SEQ ID NO: 819294 - RNA, 20 nt, Artificial Sequence
  Synthetic
uauuuagcaaucucaguucu

SEQ ID NO: 819295 - RNA, 20 nt, Artificial Sequence
  Synthetic
ugaaagccacugucaguucu

SEQ ID NO: 819296 - RNA, 20 nt, Artificial Sequence
  Synthetic
uuaaagacauugucaguucu

SEQ ID NO: 819297 - RNA, 20 nt, Artificial Sequence
  Synthetic
uaaaaagcuugaugaguucu

SEQ ID NO: 819298 - RNA, 20 nt, Artificial Sequence
  Synthetic
augauuuggacuauaguucu

SEQ ID NO: 819299 - RNA, 20 nt, Artificial Sequence
  Synthetic
uggucaugcugccuaguucu

SEQ ID NO: 819300 - RNA, 20 nt, Artificial Sequence
  Synthetic
caaaugguauuucuaguucu

SEQ ID NO: 819301 - RNA, 20 nt, Artificial Sequence
  Synthetic
uuuacuccuauuuuaguucu

SEQ ID NO: 819302 - RNA, 20 nt, Artificial Sequence
  Synthetic
aacuugaguuuuaacguucu

SEQ ID NO: 819303 - RNA, 20 nt, Artificial Sequence
  Synthetic
auuauuauacuuuacguucu

SEQ ID NO: 819304 - RNA, 20 nt, Artificial Sequence
  Synthetic
aagaaaauauguuucguucu

SEQ ID NO: 819305 - RNA, 20 nt, Artificial Sequence
  Synthetic
ucaaacaguggcaagguucu

SEQ ID NO: 819306 - RNA, 20 nt, Artificial Sequence
  Synthetic
acagcauauucacagguucu

SEQ ID NO: 819307 - RNA, 20 nt, Artificial Sequence
  Synthetic
aaaaauguguuucagguucu

SEQ ID NO: 819308 - RNA, 20 nt, Artificial Sequence
  Synthetic
ugaguccuggccuagguucu

SEQ ID NO: 819309 - RNA, 20 nt, Artificial Sequence
  Synthetic
cauaccagucgagggguucu

SEQ ID NO: 819310 - RNA, 20 nt, Artificial Sequence
  Synthetic
aauaagaacaucuggguucu

SEQ ID NO: 819311 - RNA, 20 nt, Artificial Sequence
  Synthetic
auuuauuuaguuuugguucu

SEQ ID NO: 819312 - RNA, 20 nt, Artificial Sequence
  Synthetic
agaugacaaagaaauguucu

SEQ ID NO: 819313 - RNA, 20 nt, Artificial Sequence
  Synthetic
aaccuauggagaaauguucu

SEQ ID NO: 819314 - RNA, 20 nt, Artificial Sequence
  Synthetic
uauaugccagggaauguucu

SEQ ID NO: 819315 - RNA, 20 nt, Artificial Sequence
  Synthetic
cuggcuuagagacauguucu

SEQ ID NO: 819316 - RNA, 20 nt, Artificial Sequence
  Synthetic
auuuaaagcuagcauguucu

SEQ ID NO: 819317 - RNA, 20 nt, Artificial Sequence
  Synthetic
agauauacuuuagauguucu

SEQ ID NO: 819318 - RNA, 20 nt, Artificial Sequence
  Synthetic
agaauuuucaaugauguucu

SEQ ID NO: 819319 - RNA, 20 nt, Artificial Sequence
  Synthetic
ugaaccgauaaguauguucu

SEQ ID NO: 819320 - RNA, 20 nt, Artificial Sequence
  Synthetic
aaauaauggugguauguucu

SEQ ID NO: 819321 - RNA, 20 nt, Artificial Sequence
  Synthetic
uuuuccccacuguauguucu

SEQ ID NO: 819322 - RNA, 20 nt, Artificial Sequence
  Synthetic
agguugagaaacacuguucu

SEQ ID NO: 819323 - RNA, 20 nt, Artificial Sequence
  Synthetic
uauguaucagacacuguucu

SEQ ID NO: 819324 - RNA, 20 nt, Artificial Sequence
  Synthetic
uguguaccgcaggcuguucu

SEQ ID NO: 819325 - RNA, 20 nt, Artificial Sequence
  Synthetic
uaauuaaaauaggcuguucu

SEQ ID NO: 819326 - RNA, 20 nt, Artificial Sequence
  Synthetic
uauuuuuuugcugcuguucu

SEQ ID NO: 819327 - RNA, 20 nt, Artificial Sequence
  Synthetic
uaagugcuaggugcuguucu

SEQ ID NO: 819328 - RNA, 20 nt, Artificial Sequence
  Synthetic
uucccugucuuaucuguucu

SEQ ID NO: 819329 - RNA, 20 nt, Artificial Sequence
  Synthetic
agguuguucuguucuguucu

SEQ ID NO: 819330 - RNA, 20 nt, Artificial Sequence
  Synthetic
uucuguauuuacaguguucu

SEQ ID NO: 819331 - RNA, 20 nt, Artificial Sequence
  Synthetic
ugucuauuuaggaguguucu

SEQ ID NO: 819332 - RNA, 20 nt, Artificial Sequence
  Synthetic
uuuaggaucuacuguguucu

SEQ ID NO: 819333 - RNA, 20 nt, Artificial Sequence
  Synthetic
aagcaugaagaaauuguucu

SEQ ID NO: 819334 - RNA, 20 nt, Artificial Sequence
  Synthetic
aagacugaguucauuguucu

SEQ ID NO: 819335 - RNA, 20 nt, Artificial Sequence
  Synthetic
auucaagauaauauuguucu

SEQ ID NO: 819336 - RNA, 20 nt, Artificial Sequence
  Synthetic
cuguuaaguccauuuguucu

SEQ ID NO: 819337 - RNA, 20 nt, Artificial Sequence
  Synthetic
aaaauuuagucauuuguucu

SEQ ID NO: 819338 - RNA, 20 nt, Artificial Sequence
  Synthetic
aguuaaauuauguuuguucu

SEQ ID NO: 819339 - RNA, 20 nt, Artificial Sequence
  Synthetic
agggguuuguaaaaauuucu

SEQ ID NO: 819340 - RNA, 20 nt, Artificial Sequence
  Synthetic
aauguccucccucaauuucu

SEQ ID NO: 819341 - RNA, 20 nt, Artificial Sequence
  Synthetic
ucuacugaaucagaauuucu

SEQ ID NO: 819342 - RNA, 20 nt, Artificial Sequence
  Synthetic
uguaaaauugacuaauuucu

SEQ ID NO: 819343 - RNA, 20 nt, Artificial Sequence
  Synthetic
agcuggugcuucacauuucu

SEQ ID NO: 819344 - RNA, 20 nt, Artificial Sequence
  Synthetic
aaaucucaaaugacauuucu

SEQ ID NO: 819345 - RNA, 20 nt, Artificial Sequence
  Synthetic
cucguuucacauacauuucu

SEQ ID NO: 819346 - RNA, 20 nt, Artificial Sequence
  Synthetic
ugucuauucacuacauuucu

SEQ ID NO: 819347 - RNA, 20 nt, Artificial Sequence
  Synthetic
ugaaaaugaacaccauuucu

SEQ ID NO: 819348 - RNA, 20 nt, Artificial Sequence
  Synthetic
uguugugaggacccauuucu

SEQ ID NO: 819349 - RNA, 20 nt, Artificial Sequence
  Synthetic
aauccagcaaucccauuucu

SEQ ID NO: 819350 - RNA, 20 nt, Artificial Sequence
  Synthetic
ucacugggagucccauuucu

SEQ ID NO: 819351 - RNA, 20 nt, Artificial Sequence
  Synthetic
uggcccagggcagcauuucu

SEQ ID NO: 819352 - RNA, 20 nt, Artificial Sequence
  Synthetic
ccuuuaucuuacgcauuucu

SEQ ID NO: 819353 - RNA, 20 nt, Artificial Sequence
  Synthetic
auuuuuagaacugcauuucu

SEQ ID NO: 819354 - RNA, 20 nt, Artificial Sequence
  Synthetic
uagagccugccugcauuucu

SEQ ID NO: 819355 - RNA, 20 nt, Artificial Sequence
  Synthetic
uugggcuugcaaucauuucu

SEQ ID NO: 819356 - RNA, 20 nt, Artificial Sequence
  Synthetic
aacucuaguucaucauuucu

SEQ ID NO: 819357 - RNA, 20 nt, Artificial Sequence
  Synthetic
cauuugugaagaucauuucu

SEQ ID NO: 819358 - RNA, 20 nt, Artificial Sequence
  Synthetic
ugaugugucaagucauuucu

SEQ ID NO: 819359 - RNA, 20 nt, Artificial Sequence
  Synthetic
cagugguuuaaaagauuucu

SEQ ID NO: 819360 - RNA, 20 nt, Artificial Sequence
  Synthetic
auaauggcaaucagauuucu

SEQ ID NO: 819361 - RNA, 20 nt, Artificial Sequence
  Synthetic
auuuuugaaaauagauuucu

SEQ ID NO: 819362 - RNA, 20 nt, Artificial Sequence
  Synthetic
caaaauaugaguagauuucu

SEQ ID NO: 819363 - RNA, 20 nt, Artificial Sequence
  Synthetic
uucauccuuuguagauuucu

SEQ ID NO: 819364 - RNA, 20 nt, Artificial Sequence
  Synthetic
ugcuuucugcuuggauuucu

SEQ ID NO: 819365 - RNA, 20 nt, Artificial Sequence
  Synthetic
acaaacaauaugugauuucu

SEQ ID NO: 819366 - RNA, 20 nt, Artificial Sequence
  Synthetic
cucacugaccuuugauuucu

SEQ ID NO: 819367 - RNA, 20 nt, Artificial Sequence
  Synthetic
uuuugcuccuaaauauuucu

SEQ ID NO: 819368 - RNA, 20 nt, Artificial Sequence
  Synthetic
ccuuaguaguaaauauuucu

SEQ ID NO: 819369 - RNA, 20 nt, Artificial Sequence
  Synthetic
uugccuucuguaauauuucu

SEQ ID NO: 819370 - RNA, 20 nt, Artificial Sequence
  Synthetic
uaguacuuuguaauauuucu

SEQ ID NO: 819371 - RNA, 20 nt, Artificial Sequence
  Synthetic
uuauucaagaacauauuucu

SEQ ID NO: 819372 - RNA, 20 nt, Artificial Sequence
  Synthetic
uaccaggcagacauauuucu

SEQ ID NO: 819373 - RNA, 20 nt, Artificial Sequence
  Synthetic
ucacauagucccauauuucu

SEQ ID NO: 819374 - RNA, 20 nt, Artificial Sequence
  Synthetic
ccuucuccagucauauuucu

SEQ ID NO: 819375 - RNA, 20 nt, Artificial Sequence
  Synthetic
uuaaccuuaaaacuauuucu

SEQ ID NO: 819376 - RNA, 20 nt, Artificial Sequence
  Synthetic
cagguaguacuccuauuucu

SEQ ID NO: 819377 - RNA, 20 nt, Artificial Sequence
  Synthetic
uugcuuuugcuccuauuucu

SEQ ID NO: 819378 - RNA, 20 nt, Artificial Sequence
  Synthetic
cucuucccuacucuauuucu

SEQ ID NO: 819379 - RNA, 20 nt, Artificial Sequence
  Synthetic
aagacaugauacguauuucu

SEQ ID NO: 819380 - RNA, 20 nt, Artificial Sequence
  Synthetic
ucccucuuuaucguauuucu

SEQ ID NO: 819381 - RNA, 20 nt, Artificial Sequence
  Synthetic
uaucuguuaacuguauuucu

SEQ ID NO: 819382 - RNA, 20 nt, Artificial Sequence
  Synthetic
agugagccugguguauuucu

SEQ ID NO: 819383 - RNA, 20 nt, Artificial Sequence
  Synthetic
uuuauucauuguguauuucu

SEQ ID NO: 819384 - RNA, 20 nt, Artificial Sequence
  Synthetic
uaggaggagaaguuauuucu

SEQ ID NO: 819385 - RNA, 20 nt, Artificial Sequence
  Synthetic
cugcuggaaguuuuauuucu

SEQ ID NO: 819386 - RNA, 20 nt, Artificial Sequence
  Synthetic
accugugacuccaacuuucu

SEQ ID NO: 819387 - RNA, 20 nt, Artificial Sequence
  Synthetic
cgacuuagagauaacuuucu

SEQ ID NO: 819388 - RNA, 20 nt, Artificial Sequence
  Synthetic
uuacuacacaaacacuuucu

SEQ ID NO: 819389 - RNA, 20 nt, Artificial Sequence
  Synthetic
acgcagaucuuucacuuucu

SEQ ID NO: 819390 - RNA, 20 nt, Artificial Sequence
  Synthetic
ugaggccagcuggacuuucu

SEQ ID NO: 819391 - RNA, 20 nt, Artificial Sequence
  Synthetic
auguuauuucaauacuuucu

SEQ ID NO: 819392 - RNA, 20 nt, Artificial Sequence
  Synthetic
auuuaguuuucuuacuuucu

SEQ ID NO: 819393 - RNA, 20 nt, Artificial Sequence
  Synthetic
aagcaaguuaguuacuuucu

SEQ ID NO: 819394 - RNA, 20 nt, Artificial Sequence
  Synthetic
auaagucacauaaccuuucu

SEQ ID NO: 819395 - RNA, 20 nt, Artificial Sequence
  Synthetic
uuuuugaaaagcaccuuucu

SEQ ID NO: 819396 - RNA, 20 nt, Artificial Sequence
  Synthetic
ucuguaagccguuccuuucu

SEQ ID NO: 819397 - RNA, 20 nt, Artificial Sequence
  Synthetic
uauuuacaaauuuccuuucu

SEQ ID NO: 819398 - RNA, 20 nt, Artificial Sequence
  Synthetic
uugcauaugcaaagcuuucu

SEQ ID NO: 819399 - RNA, 20 nt, Artificial Sequence
  Synthetic
cuguuagauaagggcuuucu

SEQ ID NO: 819400 - RNA, 20 nt, Artificial Sequence
  Synthetic
cucuucuaccauggcuuucu

SEQ ID NO: 819401 - RNA, 20 nt, Artificial Sequence
  Synthetic
cuuaacgucauuggcuuucu

SEQ ID NO: 819402 - RNA, 20 nt, Artificial Sequence
  Synthetic
cuuuuaagaaaaugcuuucu

SEQ ID NO: 819403 - RNA, 20 nt, Artificial Sequence
  Synthetic
cacaauaaagacugcuuucu

SEQ ID NO: 819404 - RNA, 20 nt, Artificial Sequence
  Synthetic
uuucucagaaucugcuuucu

SEQ ID NO: 819405 - RNA, 20 nt, Artificial Sequence
  Synthetic
cucgaaguucucugcuuucu

SEQ ID NO: 819406 - RNA, 20 nt, Artificial Sequence
  Synthetic
acucugaaauucugcuuucu

SEQ ID NO: 819407 - RNA, 20 nt, Artificial Sequence
  Synthetic
agaccaagccaaaucuuucu

SEQ ID NO: 819408 - RNA, 20 nt, Artificial Sequence
  Synthetic
uaaauaacccuuaucuuucu

SEQ ID NO: 819409 - RNA, 20 nt, Artificial Sequence
  Synthetic
cacaaaauugaacucuuucu

SEQ ID NO: 819410 - RNA, 20 nt, Artificial Sequence
  Synthetic
cauguagaguaucucuuucu

SEQ ID NO: 819411 - RNA, 20 nt, Artificial Sequence
  Synthetic
uaaacauucuuugucuuucu

SEQ ID NO: 819412 - RNA, 20 nt, Artificial Sequence
  Synthetic
uuaauuuuccauuucuuucu

SEQ ID NO: 819413 - RNA, 20 nt, Artificial Sequence
  Synthetic
cagaggggaauuuucuuucu

SEQ ID NO: 819414 - RNA, 20 nt, Artificial Sequence
  Synthetic
cauacaauauuuuucuuucu

SEQ ID NO: 819415 - RNA, 20 nt, Artificial Sequence
  Synthetic
cagucagaacucaaguuucu

SEQ ID NO: 819416 - RNA, 20 nt, Artificial Sequence
  Synthetic
cuugggugguucaaguuucu

SEQ ID NO: 819417 - RNA, 20 nt, Artificial Sequence
  Synthetic
auaaaauaaagagaguuucu

SEQ ID NO: 819418 - RNA, 20 nt, Artificial Sequence
  Synthetic
ugucuacuuuucuaguuucu

SEQ ID NO: 819419 - RNA, 20 nt, Artificial Sequence
  Synthetic
aaaaagacuuaaagguuucu

SEQ ID NO: 819420 - RNA, 20 nt, Artificial Sequence
  Synthetic
aaugaucaaaucagguuucu

SEQ ID NO: 819421 - RNA, 20 nt, Artificial Sequence
  Synthetic
ugacuucaucugagguuucu

SEQ ID NO: 819422 - RNA, 20 nt, Artificial Sequence
  Synthetic
uaaaggccucugagguuucu

SEQ ID NO: 819423 - RNA, 20 nt, Artificial Sequence
  Synthetic
auucaagauaauggguuucu

SEQ ID NO: 819424 - RNA, 20 nt, Artificial Sequence
  Synthetic
auauuucaggcuggguuucu

SEQ ID NO: 819425 - RNA, 20 nt, Artificial Sequence
  Synthetic
uuuuugcaugcuggguuucu

SEQ ID NO: 819426 - RNA, 20 nt, Artificial Sequence
  Synthetic
aaugguaucagaugguuucu

SEQ ID NO: 819427 - RNA, 20 nt, Artificial Sequence
  Synthetic
ccuaaauaguucugguuucu

SEQ ID NO: 819428 - RNA, 20 nt, Artificial Sequence
  Synthetic
ugagcacugcugugguuucu

SEQ ID NO: 819429 - RNA, 20 nt, Artificial Sequence
  Synthetic
ucucucucaacaauguuucu

SEQ ID NO: 819430 - RNA, 20 nt, Artificial Sequence
  Synthetic
auacaaaacagaauguuucu

SEQ ID NO: 819431 - RNA, 20 nt, Artificial Sequence
  Synthetic
auauuuuuauuguuguuucu

SEQ ID NO: 819432 - RNA, 20 nt, Artificial Sequence
  Synthetic
aacaaguuuucuuuguuucu

SEQ ID NO: 819433 - RNA, 20 nt, Artificial Sequence
  Synthetic
uggaaauaauuuuuguuucu

SEQ ID NO: 819434 - RNA, 20 nt, Artificial Sequence
  Synthetic
auaaauaagcacaauuuucu

SEQ ID NO: 819435 - RNA, 20 nt, Artificial Sequence
  Synthetic
accaucagacagaauuuucu

SEQ ID NO: 819436 - RNA, 20 nt, Artificial Sequence
  Synthetic
cugaaaaaacgccauuuucu

SEQ ID NO: 819437 - RNA, 20 nt, Artificial Sequence
  Synthetic
auuguaacacagcauuuucu

SEQ ID NO: 819438 - RNA, 20 nt, Artificial Sequence
  Synthetic
aaacgggaauggcauuuucu

SEQ ID NO: 819439 - RNA, 20 nt, Artificial Sequence
  Synthetic
uacuuuguccugcauuuucu

SEQ ID NO: 819440 - RNA, 20 nt, Artificial Sequence
  Synthetic
aggaaaccguaucauuuucu

SEQ ID NO: 819441 - RNA, 20 nt, Artificial Sequence
  Synthetic
auucuugcuuaggauuuucu

SEQ ID NO: 819442 - RNA, 20 nt, Artificial Sequence
  Synthetic
acccuuuuagcugauuuucu

SEQ ID NO: 819443 - RNA, 20 nt, Artificial Sequence
  Synthetic
cagaacgaaacauauuuucu

SEQ ID NO: 819444 - RNA, 20 nt, Artificial Sequence
  Synthetic
uuagucauuuucacuuuucu

SEQ ID NO: 819445 - RNA, 20 nt, Artificial Sequence
  Synthetic
uaacacuguuggacuuuucu

SEQ ID NO: 819446 - RNA, 20 nt, Artificial Sequence
  Synthetic
auaaucccaucuacuuuucu

SEQ ID NO: 819447 - RNA, 20 nt, Artificial Sequence
  Synthetic
cuuuauaauauuacuuuucu

SEQ ID NO: 819448 - RNA, 20 nt, Artificial Sequence
  Synthetic
caauaaauguuuacuuuucu

SEQ ID NO: 819449 - RNA, 20 nt, Artificial Sequence
  Synthetic
acaucucaaaucccuuuucu

SEQ ID NO: 819450 - RNA, 20 nt, Artificial Sequence
  Synthetic
ucugucaguacugcuuuucu

SEQ ID NO: 819451 - RNA, 20 nt, Artificial Sequence
  Synthetic
uuugaauuuugaucuuuucu

SEQ ID NO: 819452 - RNA, 20 nt, Artificial Sequence
  Synthetic
cugcucuuucuaucuuuucu

SEQ ID NO: 819453 - RNA, 20 nt, Artificial Sequence
  Synthetic
caaugaacucagucuuuucu

SEQ ID NO: 819454 - RNA, 20 nt, Artificial Sequence
  Synthetic
uuguuaacccacaguuuucu

SEQ ID NO: 819455 - RNA, 20 nt, Artificial Sequence
  Synthetic
ucuugguaaaucaguuuucu

SEQ ID NO: 819456 - RNA, 20 nt, Artificial Sequence
  Synthetic
uccaacuuuaucaguuuucu

SEQ ID NO: 819457 - RNA, 20 nt, Artificial Sequence
  Synthetic
acaaguuaccggaguuuucu

SEQ ID NO: 819458 - RNA, 20 nt, Artificial Sequence
  Synthetic
aucaguuuuugagguuuucu

SEQ ID NO: 819459 - RNA, 20 nt, Artificial Sequence
  Synthetic
augaaucauggguguuuucu

SEQ ID NO: 819460 - RNA, 20 nt, Artificial Sequence
  Synthetic
cagggaacaauguguuuucu

SEQ ID NO: 819461 - RNA, 20 nt, Artificial Sequence
  Synthetic
uuaagagaguaaauuuuucu

SEQ ID NO: 819462 - RNA, 20 nt, Artificial Sequence
  Synthetic
uggcauugaauaauuuuucu

SEQ ID NO: 819463 - RNA, 20 nt, Artificial Sequence
  Synthetic
cugacacaaaacauuuuucu

SEQ ID NO: 819464 - RNA, 20 nt, Artificial Sequence
  Synthetic
aaacggcagcacauuuuucu

SEQ ID NO: 819465 - RNA, 20 nt, Artificial Sequence
  Synthetic
uaaauuugggucauuuuucu

SEQ ID NO: 819466 - RNA, 20 nt, Artificial Sequence
  Synthetic
aggcccuuaugacuuuuucu

SEQ ID NO: 819467 - RNA, 20 nt, Artificial Sequence
  Synthetic
uucaauccacaaguuuuucu

SEQ ID NO: 819468 - RNA, 20 nt, Artificial Sequence
  Synthetic
uauaugccaaauguuuuucu

SEQ ID NO: 819469 - RNA, 20 nt, Artificial Sequence
  Synthetic
ugguacuucuuuguuuuucu

SEQ ID NO: 819470 - RNA, 20 nt, Artificial Sequence
  Synthetic
ccaugaaauaaauuuuuucu

SEQ ID NO: 819471 - RNA, 20 nt, Artificial Sequence
  Synthetic
aaacagaugacauuuuuucu

SEQ ID NO: 819472 - RNA, 20 nt, Artificial Sequence
  Synthetic
auagagaguagauuuuuucu

SEQ ID NO: 819473 - RNA, 20 nt, Artificial Sequence
  Synthetic
aaguuuaaggacuuuuuucu

SEQ ID NO: 819474 - RNA, 20 nt, Artificial Sequence
  Synthetic
ccaugagcaagcuuuuuucu

SEQ ID NO: 819475 - RNA, 20 nt, Artificial Sequence
  Synthetic
aaucuucucucuuuuuuucu

SEQ ID NO: 819476 - RNA, 20 nt, Artificial Sequence
  Synthetic
uuuuuuuuuucuuuuuuucu

SEQ ID NO: 819477 - RNA, 20 nt, Artificial Sequence
  Synthetic
ucauucagcaguuuuuuucu

SEQ ID NO: 819478 - RNA, 20 nt, Artificial Sequence
  Synthetic
cuucagauuauuuuuuuucu

SEQ ID NO: 819479 - RNA, 20 nt, Artificial Sequence
  Synthetic
acauuagauuuuuuuuuucu

SEQ ID NO: 819480 - RNA, 20 nt, Artificial Sequence
  Synthetic
uaauugaaaacaaaaaaagu

SEQ ID NO: 819481 - RNA, 20 nt, Artificial Sequence
  Synthetic
uaaugcucaggaaaaaaagu

SEQ ID NO: 819482 - RNA, 20 nt, Artificial Sequence
  Synthetic
aaugucuuuggaaaaaaagu

SEQ ID NO: 819483 - RNA, 20 nt, Artificial Sequence
  Synthetic
uacuuaugugagaaaaaagu

SEQ ID NO: 819484 - RNA, 20 nt, Artificial Sequence
  Synthetic
caaaacaaagaacaaaaagu

SEQ ID NO: 819485 - RNA, 20 nt, Artificial Sequence
  Synthetic
ucugucauuaaccaaaaagu

SEQ ID NO: 819486 - RNA, 20 nt, Artificial Sequence
  Synthetic
aaggaugccuuccaaaaagu

SEQ ID NO: 819487 - RNA, 20 nt, Artificial Sequence
  Synthetic
aaacaaccccaucaaaaagu

SEQ ID NO: 819488 - RNA, 20 nt, Artificial Sequence
  Synthetic
uuuaauauuccucaaaaagu

SEQ ID NO: 819489 - RNA, 20 nt, Artificial Sequence
  Synthetic
acaauuuccugagaaaaagu

SEQ ID NO: 819490 - RNA, 20 nt, Artificial Sequence
  Synthetic
aagaggaucauagaaaaagu

SEQ ID NO: 819491 - RNA, 20 nt, Artificial Sequence
  Synthetic
cugggguuggaggaaaaagu

SEQ ID NO: 819492 - RNA, 20 nt, Artificial Sequence
  Synthetic
uaacacuuucuggaaaaagu

SEQ ID NO: 819493 - RNA, 20 nt, Artificial Sequence
  Synthetic
auauuguaccaauaaaaagu

SEQ ID NO: 819494 - RNA, 20 nt, Artificial Sequence
  Synthetic
uacuuaacaucauaaaaagu

SEQ ID NO: 819495 - RNA, 20 nt, Artificial Sequence
  Synthetic
aagggauuugacuaaaaagu

SEQ ID NO: 819496 - RNA, 20 nt, Artificial Sequence
  Synthetic
cggauacaacuuuaaaaagu

SEQ ID NO: 819497 - RNA, 20 nt, Artificial Sequence
  Synthetic
cuuugaauuaguacaaaagu

SEQ ID NO: 819498 - RNA, 20 nt, Artificial Sequence
  Synthetic
aagcaguuguacccaaaagu

SEQ ID NO: 819499 - RNA, 20 nt, Artificial Sequence
  Synthetic
aaacaaccccauccaaaagu

SEQ ID NO: 819500 - RNA, 20 nt, Artificial Sequence
  Synthetic
ugcaaaggaggagcaaaagu

SEQ ID NO: 819501 - RNA, 20 nt, Artificial Sequence
  Synthetic
cucuuuagaacugcaaaagu

SEQ ID NO: 819502 - RNA, 20 nt, Artificial Sequence
  Synthetic
uuaagauagaaaagaaaagu

SEQ ID NO: 819503 - RNA, 20 nt, Artificial Sequence
  Synthetic
uaaaccagucagagaaaagu

SEQ ID NO: 819504 - RNA, 20 nt, Artificial Sequence
  Synthetic
cuggcagaauagagaaaagu

SEQ ID NO: 819505 - RNA, 20 nt, Artificial Sequence
  Synthetic
aaacaugaaucuagaaaagu

SEQ ID NO: 819506 - RNA, 20 nt, Artificial Sequence
  Synthetic
aagucaacaaaacgaaaagu

SEQ ID NO: 819507 - RNA, 20 nt, Artificial Sequence
  Synthetic
aaccaaccucaucgaaaagu

SEQ ID NO: 819508 - RNA, 20 nt, Artificial Sequence
  Synthetic
aaaugucauaaaggaaaagu

SEQ ID NO: 819509 - RNA, 20 nt, Artificial Sequence
  Synthetic
auaauagaauauggaaaagu

SEQ ID NO: 819510 - RNA, 20 nt, Artificial Sequence
  Synthetic
agcaggacauauugaaaagu

SEQ ID NO: 819511 - RNA, 20 nt, Artificial Sequence
  Synthetic
aauggcuuuccuugaaaagu

SEQ ID NO: 819512 - RNA, 20 nt, Artificial Sequence
  Synthetic
uaauuacaaggaauaaaagu

SEQ ID NO: 819513 - RNA, 20 nt, Artificial Sequence
  Synthetic
ugagaaaaaaugauaaaagu

SEQ ID NO: 819514 - RNA, 20 nt, Artificial Sequence
  Synthetic
uuugguucccuuauaaaagu

SEQ ID NO: 819515 - RNA, 20 nt, Artificial Sequence
  Synthetic
aagucaauaaaacuaaaagu

SEQ ID NO: 819516 - RNA, 20 nt, Artificial Sequence
  Synthetic
caucucuuagaaguaaaagu

SEQ ID NO: 819517 - RNA, 20 nt, Artificial Sequence
  Synthetic
acauguucucacuuaaaagu

SEQ ID NO: 819518 - RNA, 20 nt, Artificial Sequence
  Synthetic
auaauccccaccuuaaaagu

SEQ ID NO: 819519 - RNA, 20 nt, Artificial Sequence
  Synthetic
agaucugguuguuuaaaagu

SEQ ID NO: 819520 - RNA, 20 nt, Artificial Sequence
  Synthetic
agaauuucaagccacaaagu

SEQ ID NO: 819521 - RNA, 20 nt, Artificial Sequence
  Synthetic
acccguaagagccacaaagu

SEQ ID NO: 819522 - RNA, 20 nt, Artificial Sequence
  Synthetic
uauagugcugagcacaaagu

SEQ ID NO: 819523 - RNA, 20 nt, Artificial Sequence
  Synthetic
aucaguguuuggcacaaagu

SEQ ID NO: 819524 - RNA, 20 nt, Artificial Sequence
  Synthetic
aguagcucaagauacaaagu

SEQ ID NO: 819525 - RNA, 20 nt, Artificial Sequence
  Synthetic
ugugguuacuauuacaaagu

SEQ ID NO: 819526 - RNA, 20 nt, Artificial Sequence
  Synthetic
uggguuaauuauuacaaagu

SEQ ID NO: 819527 - RNA, 20 nt, Artificial Sequence
  Synthetic
aaaaaaaaaaaaaccaaagu

SEQ ID NO: 819528 - RNA, 20 nt, Artificial Sequence
  Synthetic
uauuuggccuuuaccaaagu

SEQ ID NO: 819529 - RNA, 20 nt, Artificial Sequence
  Synthetic
caacagaauguaagcaaagu

SEQ ID NO: 819530 - RNA, 20 nt, Artificial Sequence
  Synthetic
uuaauauaaaugagcaaagu

SEQ ID NO: 819531 - RNA, 20 nt, Artificial Sequence
  Synthetic
agcaguaagcaaggcaaagu

SEQ ID NO: 819532 - RNA, 20 nt, Artificial Sequence
  Synthetic
acaucuuuauuaaucaaagu

SEQ ID NO: 819533 - RNA, 20 nt, Artificial Sequence
  Synthetic
aaucagagauuacucaaagu

SEQ ID NO: 819534 - RNA, 20 nt, Artificial Sequence
  Synthetic
cugaaaccgcagcucaaagu

SEQ ID NO: 819535 - RNA, 20 nt, Artificial Sequence
  Synthetic
auaaauaguucauucaaagu

SEQ ID NO: 819536 - RNA, 20 nt, Artificial Sequence
  Synthetic
aguaauuuuagauucaaagu

SEQ ID NO: 819537 - RNA, 20 nt, Artificial Sequence
  Synthetic
auucucucagaaaagaaagu

SEQ ID NO: 819538 - RNA, 20 nt, Artificial Sequence
  Synthetic
uaauggagaucaaagaaagu

SEQ ID NO: 819539 - RNA, 20 nt, Artificial Sequence
  Synthetic
ucccuguccccccagaaagu

SEQ ID NO: 819540 - RNA, 20 nt, Artificial Sequence
  Synthetic
aaaaaaacccaucagaaagu

SEQ ID NO: 819541 - RNA, 20 nt, Artificial Sequence
  Synthetic
aaaagaccccaucagaaagu

SEQ ID NO: 819542 - RNA, 20 nt, Artificial Sequence
  Synthetic
ccaauuuccaaagagaaagu

SEQ ID NO: 819543 - RNA, 20 nt, Artificial Sequence
  Synthetic
uaucauuauaaagagaaagu

SEQ ID NO: 819544 - RNA, 20 nt, Artificial Sequence
  Synthetic
caaaaucagugagagaaagu

SEQ ID NO: 819545 - RNA, 20 nt, Artificial Sequence
  Synthetic
cgcauuuuggaggagaaagu

SEQ ID NO: 819546 - RNA, 20 nt, Artificial Sequence
  Synthetic
ugauugagaauugagaaagu

SEQ ID NO: 819547 - RNA, 20 nt, Artificial Sequence
  Synthetic
aggauaaacaaguagaaagu

SEQ ID NO: 819548 - RNA, 20 nt, Artificial Sequence
  Synthetic
aggaaaacaauuuagaaagu

SEQ ID NO: 819549 - RNA, 20 nt, Artificial Sequence
  Synthetic
cacugaucucaaaggaaagu

SEQ ID NO: 819550 - RNA, 20 nt, Artificial Sequence
  Synthetic
cucaggaaaacgaggaaagu

SEQ ID NO: 819551 - RNA, 20 nt, Artificial Sequence
  Synthetic
aauauguaacuggggaaagu

SEQ ID NO: 819552 - RNA, 20 nt, Artificial Sequence
  Synthetic
cgaacuagacauuggaaagu

SEQ ID NO: 819553 - RNA, 20 nt, Artificial Sequence
  Synthetic
ugguaaugggaaaugaaagu

SEQ ID NO: 819554 - RNA, 20 nt, Artificial Sequence
  Synthetic
uagaucucagcugugaaagu

SEQ ID NO: 819555 - RNA, 20 nt, Artificial Sequence
  Synthetic
aucugcccaauguugaaagu

SEQ ID NO: 819556 - RNA, 20 nt, Artificial Sequence
  Synthetic
uuucaaauauauuugaaagu

SEQ ID NO: 819557 - RNA, 20 nt, Artificial Sequence
  Synthetic
augcaaagcccuuugaaagu

SEQ ID NO: 819558 - RNA, 20 nt, Artificial Sequence
  Synthetic
uuccuuuucauuuugaaagu

SEQ ID NO: 819559 - RNA, 20 nt, Artificial Sequence
  Synthetic
ucuguaaaccuuuugaaagu

SEQ ID NO: 819560 - RNA, 20 nt, Artificial Sequence
  Synthetic
uuuaaaaagguaaauaaagu

SEQ ID NO: 819561 - RNA, 20 nt, Artificial Sequence
  Synthetic
caauuaauuggcaauaaagu

SEQ ID NO: 819562 - RNA, 20 nt, Artificial Sequence
  Synthetic
cacaugaucccucauaaagu

SEQ ID NO: 819563 - RNA, 20 nt, Artificial Sequence
  Synthetic
auguuaauaucagauaaagu

SEQ ID NO: 819564 - RNA, 20 nt, Artificial Sequence
  Synthetic
uggauaagcucagauaaagu

SEQ ID NO: 819565 - RNA, 20 nt, Artificial Sequence
  Synthetic
uauaaaauaaaugauaaagu

SEQ ID NO: 819566 - RNA, 20 nt, Artificial Sequence
  Synthetic
cccuagaaaacugauaaagu

SEQ ID NO: 819567 - RNA, 20 nt, Artificial Sequence
  Synthetic
auagaaacagaauauaaagu

SEQ ID NO: 819568 - RNA, 20 nt, Artificial Sequence
  Synthetic
auugcaguaauuuauaaagu

SEQ ID NO: 819569 - RNA, 20 nt, Artificial Sequence
  Synthetic
uaaguuagaauaacuaaagu

SEQ ID NO: 819570 - RNA, 20 nt, Artificial Sequence
  Synthetic
uuccuaaauuuuacuaaagu

SEQ ID NO: 819571 - RNA, 20 nt, Artificial Sequence
  Synthetic
aagaagauucaaccuaaagu

SEQ ID NO: 819572 - RNA, 20 nt, Artificial Sequence
  Synthetic
uguauucauaucaguaaagu

SEQ ID NO: 819573 - RNA, 20 nt, Artificial Sequence
  Synthetic
aaugagaagaccgguaaagu

SEQ ID NO: 819574 - RNA, 20 nt, Artificial Sequence
  Synthetic
agguuuuuaggggguaaagu

SEQ ID NO: 819575 - RNA, 20 nt, Artificial Sequence
  Synthetic
aguguuuuuagauguaaagu

SEQ ID NO: 819576 - RNA, 20 nt, Artificial Sequence
  Synthetic
uucuggcaaaaaauuaaagu

SEQ ID NO: 819577 - RNA, 20 nt, Artificial Sequence
  Synthetic
auauuuggaagaauuaaagu

SEQ ID NO: 819578 - RNA, 20 nt, Artificial Sequence
  Synthetic
cacacaucaaacauuaaagu

SEQ ID NO: 819579 - RNA, 20 nt, Artificial Sequence
  Synthetic
cuuaucuaauucauuaaagu

SEQ ID NO: 819580 - RNA, 20 nt, Artificial Sequence
  Synthetic
cuagaagaugagauuaaagu

SEQ ID NO: 819581 - RNA, 20 nt, Artificial Sequence
  Synthetic
auuacccuagaucuuaaagu

SEQ ID NO: 819582 - RNA, 20 nt, Artificial Sequence
  Synthetic
aauauaauuaauguuaaagu

SEQ ID NO: 819583 - RNA, 20 nt, Artificial Sequence
  Synthetic
uacugaacaaauuuuaaagu

SEQ ID NO: 819584 - RNA, 20 nt, Artificial Sequence
  Synthetic
ccuaaaaguguuaaacaagu

SEQ ID NO: 819585 - RNA, 20 nt, Artificial Sequence
  Synthetic
auuaaaucuauagaacaagu

SEQ ID NO: 819586 - RNA, 20 nt, Artificial Sequence
  Synthetic
caucacagacuagaacaagu

SEQ ID NO: 819587 - RNA, 20 nt, Artificial Sequence
  Synthetic
augaacaccugggaacaagu

SEQ ID NO: 819588 - RNA, 20 nt, Artificial Sequence
  Synthetic
aaaaccaaaaauuaacaagu

SEQ ID NO: 819589 - RNA, 20 nt, Artificial Sequence
  Synthetic
ugaaaaacuuuuagacaagu

SEQ ID NO: 819590 - RNA, 20 nt, Artificial Sequence
  Synthetic
uacagucugcacauacaagu

SEQ ID NO: 819591 - RNA, 20 nt, Artificial Sequence
  Synthetic
aagggugcagagauacaagu

SEQ ID NO: 819592 - RNA, 20 nt, Artificial Sequence
  Synthetic
uuucaaucuuagcuacaagu

SEQ ID NO: 819593 - RNA, 20 nt, Artificial Sequence
  Synthetic
uggggagaauggaaccaagu

SEQ ID NO: 819594 - RNA, 20 nt, Artificial Sequence
  Synthetic
uguggagaauggaaccaagu

SEQ ID NO: 819595 - RNA, 20 nt, Artificial Sequence
  Synthetic
cggaugcauuuuccccaagu

SEQ ID NO: 819596 - RNA, 20 nt, Artificial Sequence
  Synthetic
caucuggaagggggccaagu

SEQ ID NO: 819597 - RNA, 20 nt, Artificial Sequence
  Synthetic
uucagaauaccuuuccaagu

SEQ ID NO: 819598 - RNA, 20 nt, Artificial Sequence
  Synthetic
cccauaagcauuaagcaagu

SEQ ID NO: 819599 - RNA, 20 nt, Artificial Sequence
  Synthetic
auaccccuacagcagcaagu

SEQ ID NO: 819600 - RNA, 20 nt, Artificial Sequence
  Synthetic
auagagaaaaccaggcaagu

SEQ ID NO: 819601 - RNA, 20 nt, Artificial Sequence
  Synthetic
uaacauauagggaggcaagu

SEQ ID NO: 819602 - RNA, 20 nt, Artificial Sequence
  Synthetic
cuuagacugguucggcaagu

SEQ ID NO: 819603 - RNA, 20 nt, Artificial Sequence
  Synthetic
aaagacacagacuggcaagu

SEQ ID NO: 819604 - RNA, 20 nt, Artificial Sequence
  Synthetic
auccaaugcuucuggcaagu

SEQ ID NO: 819605 - RNA, 20 nt, Artificial Sequence
  Synthetic
aaacucaaaguguggcaagu

SEQ ID NO: 819606 - RNA, 20 nt, Artificial Sequence
  Synthetic
auugcaaugaggaugcaagu

SEQ ID NO: 819607 - RNA, 20 nt, Artificial Sequence
  Synthetic
uuaaauggaaaucugcaagu

SEQ ID NO: 819608 - RNA, 20 nt, Artificial Sequence
  Synthetic
uuccagccugcucugcaagu

SEQ ID NO: 819609 - RNA, 20 nt, Artificial Sequence
  Synthetic
aguauuugcugcuugcaagu

SEQ ID NO: 819610 - RNA, 20 nt, Artificial Sequence
  Synthetic
agagugagaggguugcaagu

SEQ ID NO: 819611 - RNA, 20 nt, Artificial Sequence
  Synthetic
aacccauucauuuugcaagu

SEQ ID NO: 819612 - RNA, 20 nt, Artificial Sequence
  Synthetic
aaagcacuaggaaaucaagu

SEQ ID NO: 819613 - RNA, 20 nt, Artificial Sequence
  Synthetic
cauauccaucacaaucaagu

SEQ ID NO: 819614 - RNA, 20 nt, Artificial Sequence
  Synthetic
cuuauccaccaugaucaagu

SEQ ID NO: 819615 - RNA, 20 nt, Artificial Sequence
  Synthetic
cuuauccagcaugaucaagu

SEQ ID NO: 819616 - RNA, 20 nt, Artificial Sequence
  Synthetic
caugugaugacauaucaagu

SEQ ID NO: 819617 - RNA, 20 nt, Artificial Sequence
  Synthetic
acucacacuuuuccucaagu

SEQ ID NO: 819618 - RNA, 20 nt, Artificial Sequence
  Synthetic
aggaguuagacaggucaagu

SEQ ID NO: 819619 - RNA, 20 nt, Artificial Sequence
  Synthetic
aaagaugaaaguauucaagu

SEQ ID NO: 819620 - RNA, 20 nt, Artificial Sequence
  Synthetic
cugacccaugggcuucaagu

SEQ ID NO: 819621 - RNA, 20 nt, Artificial Sequence
  Synthetic
uugaaaguuguucuucaagu

SEQ ID NO: 819622 - RNA, 20 nt, Artificial Sequence
  Synthetic
cccuuuaaaucuguucaagu

SEQ ID NO: 819623 - RNA, 20 nt, Artificial Sequence
  Synthetic
aggugggauguauuucaagu

SEQ ID NO: 819624 - RNA, 20 nt, Artificial Sequence
  Synthetic
uuuuggacuuguuuucaagu

SEQ ID NO: 819625 - RNA, 20 nt, Artificial Sequence
  Synthetic
agaacauucaaaaaagaagu

SEQ ID NO: 819626 - RNA, 20 nt, Artificial Sequence
  Synthetic
uagguauuguuaaaagaagu

SEQ ID NO: 819627 - RNA, 20 nt, Artificial Sequence
  Synthetic
cucaaagaaaauaaagaagu

SEQ ID NO: 819628 - RNA, 20 nt, Artificial Sequence
  Synthetic
uaaaggcaggcuaaagaagu

SEQ ID NO: 819629 - RNA, 20 nt, Artificial Sequence
  Synthetic
aauaauaagagccaagaagu

SEQ ID NO: 819630 - RNA, 20 nt, Artificial Sequence
  Synthetic
cccgcagagaggcaagaagu

SEQ ID NO: 819631 - RNA, 20 nt, Artificial Sequence
  Synthetic
aauuucaacaaugaagaagu

SEQ ID NO: 819632 - RNA, 20 nt, Artificial Sequence
  Synthetic
aaugaacaacaguaagaagu

SEQ ID NO: 819633 - RNA, 20 nt, Artificial Sequence
  Synthetic
aagaagagcuauuaagaagu

SEQ ID NO: 819634 - RNA, 20 nt, Artificial Sequence
  Synthetic
uaaggccugaguuaagaagu

SEQ ID NO: 819635 - RNA, 20 nt, Artificial Sequence
  Synthetic
aagacaaggacaacagaagu

SEQ ID NO: 819636 - RNA, 20 nt, Artificial Sequence
  Synthetic
agauaagaggggacagaagu

SEQ ID NO: 819637 - RNA, 20 nt, Artificial Sequence
  Synthetic
uugaguauguacccagaagu

SEQ ID NO: 819638 - RNA, 20 nt, Artificial Sequence
  Synthetic
uaauggcaacauccagaagu

SEQ ID NO: 819639 - RNA, 20 nt, Artificial Sequence
  Synthetic
auauucuuggaagcagaagu

SEQ ID NO: 819640 - RNA, 20 nt, Artificial Sequence
  Synthetic
agggcagaagccucagaagu

SEQ ID NO: 819641 - RNA, 20 nt, Artificial Sequence
  Synthetic
agaaacaauggaagagaagu

SEQ ID NO: 819642 - RNA, 20 nt, Artificial Sequence
  Synthetic
acaggaggauggagagaagu

SEQ ID NO: 819643 - RNA, 20 nt, Artificial Sequence
  Synthetic
cacaacaaagguagagaagu

SEQ ID NO: 819644 - RNA, 20 nt, Artificial Sequence
  Synthetic
cauuucagcauuagagaagu

SEQ ID NO: 819645 - RNA, 20 nt, Artificial Sequence
  Synthetic
uaguauauuauaggagaagu

SEQ ID NO: 819646 - RNA, 20 nt, Artificial Sequence
  Synthetic
agagacuuauuaggagaagu

SEQ ID NO: 819647 - RNA, 20 nt, Artificial Sequence
  Synthetic
cagcuggccaggggagaagu

SEQ ID NO: 819648 - RNA, 20 nt, Artificial Sequence
  Synthetic
cugaggcccucaugagaagu

SEQ ID NO: 819649 - RNA, 20 nt, Artificial Sequence
  Synthetic
augguggugaguugagaagu

SEQ ID NO: 819650 - RNA, 20 nt, Artificial Sequence
  Synthetic
aguggcagcucaauagaagu

SEQ ID NO: 819651 - RNA, 20 nt, Artificial Sequence
  Synthetic
cuaggaaaaagccuagaagu

SEQ ID NO: 819652 - RNA, 20 nt, Artificial Sequence
  Synthetic
cauaucugaguaguagaagu

SEQ ID NO: 819653 - RNA, 20 nt, Artificial Sequence
  Synthetic
acacuuugggaggccgaagu

SEQ ID NO: 819654 - RNA, 20 nt, Artificial Sequence
  Synthetic
gcacuuugggaggccgaagu

SEQ ID NO: 819655 - RNA, 20 nt, Artificial Sequence
  Synthetic
cauguuggggagaaggaagu

SEQ ID NO: 819656 - RNA, 20 nt, Artificial Sequence
  Synthetic
cuuccugcaagucaggaagu

SEQ ID NO: 819657 - RNA, 20 nt, Artificial Sequence
  Synthetic
uuguaagcagaagaggaagu

SEQ ID NO: 819658 - RNA, 20 nt, Artificial Sequence
  Synthetic
auuuguagcagagaggaagu

SEQ ID NO: 819659 - RNA, 20 nt, Artificial Sequence
  Synthetic
aggugaugacauuaggaagu

SEQ ID NO: 819660 - RNA, 20 nt, Artificial Sequence
  Synthetic
uuugacgaauugacggaagu

SEQ ID NO: 819661 - RNA, 20 nt, Artificial Sequence
  Synthetic
uuggauauauacccggaagu

SEQ ID NO: 819662 - RNA, 20 nt, Artificial Sequence
  Synthetic
aaucuaugaauaagggaagu

SEQ ID NO: 819663 - RNA, 20 nt, Artificial Sequence
  Synthetic
cuguccuuaaaaggggaagu

SEQ ID NO: 819664 - RNA, 20 nt, Artificial Sequence
  Synthetic
cuggcugucuuuggggaagu

SEQ ID NO: 819665 - RNA, 20 nt, Artificial Sequence
  Synthetic
uggggccugggcugggaagu

SEQ ID NO: 819666 - RNA, 20 nt, Artificial Sequence
  Synthetic
aacaaacagauaauggaagu

SEQ ID NO: 819667 - RNA, 20 nt, Artificial Sequence
  Synthetic
auuggcagguuuauggaagu

SEQ ID NO: 819668 - RNA, 20 nt, Artificial Sequence
  Synthetic
aaauacagcacaguggaagu

SEQ ID NO: 819669 - RNA, 20 nt, Artificial Sequence
  Synthetic
aguucaaccauuguggaagu

SEQ ID NO: 819670 - RNA, 20 nt, Artificial Sequence
  Synthetic
uucugaacguguuuggaagu

SEQ ID NO: 819671 - RNA, 20 nt, Artificial Sequence
  Synthetic
cacuauaggaaaaaugaagu

SEQ ID NO: 819672 - RNA, 20 nt, Artificial Sequence
  Synthetic
aguuauuguaaaaaugaagu

SEQ ID NO: 819673 - RNA, 20 nt, Artificial Sequence
  Synthetic
uuggaagauauuuaugaagu

SEQ ID NO: 819674 - RNA, 20 nt, Artificial Sequence
  Synthetic
caauacaauuuuuaugaagu

SEQ ID NO: 819675 - RNA, 20 nt, Artificial Sequence
  Synthetic
uucuuuuucuucacugaagu

SEQ ID NO: 819676 - RNA, 20 nt, Artificial Sequence
  Synthetic
aaacuguuauggacugaagu

SEQ ID NO: 819677 - RNA, 20 nt, Artificial Sequence
  Synthetic
cuucuguaguugacugaagu

SEQ ID NO: 819678 - RNA, 20 nt, Artificial Sequence
  Synthetic
cugagcaacgauacugaagu

SEQ ID NO: 819679 - RNA, 20 nt, Artificial Sequence
  Synthetic
auucacauuugagcugaagu

SEQ ID NO: 819680 - RNA, 20 nt, Artificial Sequence
  Synthetic
ugauucaacaguucugaagu

SEQ ID NO: 819681 - RNA, 20 nt, Artificial Sequence
  Synthetic
uuuaaauguccuagugaagu

SEQ ID NO: 819682 - RNA, 20 nt, Artificial Sequence
  Synthetic
ucuuaacgcuuuagugaagu

SEQ ID NO: 819683 - RNA, 20 nt, Artificial Sequence
  Synthetic
uuuuauuuccucugugaagu

SEQ ID NO: 819684 - RNA, 20 nt, Artificial Sequence
  Synthetic
uagcagcuaucuauugaagu

SEQ ID NO: 819685 - RNA, 20 nt, Artificial Sequence
  Synthetic
cuucagucuugccuugaagu

SEQ ID NO: 819686 - RNA, 20 nt, Artificial Sequence
  Synthetic
aagaaaggaauucuugaagu

SEQ ID NO: 819687 - RNA, 20 nt, Artificial Sequence
  Synthetic
aacguggcagugguugaagu

SEQ ID NO: 819688 - RNA, 20 nt, Artificial Sequence
  Synthetic
aagagaaguuacuuugaagu

SEQ ID NO: 819689 - RNA, 20 nt, Artificial Sequence
  Synthetic
cuuauaguauaguuugaagu

SEQ ID NO: 819690 - RNA, 20 nt, Artificial Sequence
  Synthetic
ugauucaacaguuuugaagu

SEQ ID NO: 819691 - RNA, 20 nt, Artificial Sequence
  Synthetic
ccaucauaagcuaaauaagu

SEQ ID NO: 819692 - RNA, 20 nt, Artificial Sequence
  Synthetic
ccaauaacaccagaauaagu

SEQ ID NO: 819693 - RNA, 20 nt, Artificial Sequence
  Synthetic
caagaacauguagaauaagu

SEQ ID NO: 819694 - RNA, 20 nt, Artificial Sequence
  Synthetic
uuauacucuugugaauaagu

SEQ ID NO: 819695 - RNA, 20 nt, Artificial Sequence
  Synthetic
ccaaugaaauaaacauaagu

SEQ ID NO: 819696 - RNA, 20 nt, Artificial Sequence
  Synthetic
agaagaaagaagacauaagu

SEQ ID NO: 819697 - RNA, 20 nt, Artificial Sequence
  Synthetic
acauauucucacccauaagu

SEQ ID NO: 819698 - RNA, 20 nt, Artificial Sequence
  Synthetic
acagccuuggaggcauaagu

SEQ ID NO: 819699 - RNA, 20 nt, Artificial Sequence
  Synthetic
accccuacucuugcauaagu

SEQ ID NO: 819700 - RNA, 20 nt, Artificial Sequence
  Synthetic
augagacuugaaggauaagu

SEQ ID NO: 819701 - RNA, 20 nt, Artificial Sequence
  Synthetic
auaauugauagaugauaagu

SEQ ID NO: 819702 - RNA, 20 nt, Artificial Sequence
  Synthetic
ccuauuguaugucuauaagu

SEQ ID NO: 819703 - RNA, 20 nt, Artificial Sequence
  Synthetic
aaacuauugccuguauaagu

SEQ ID NO: 819704 - RNA, 20 nt, Artificial Sequence
  Synthetic
auaauaugcacauuauaagu

SEQ ID NO: 819705 - RNA, 20 nt, Artificial Sequence
  Synthetic
auauguucucacuuauaagu

SEQ ID NO: 819706 - RNA, 20 nt, Artificial Sequence
  Synthetic
cuuuguucucacuuauaagu

SEQ ID NO: 819707 - RNA, 20 nt, Artificial Sequence
  Synthetic
uuuuuugcugccuuauaagu

SEQ ID NO: 819708 - RNA, 20 nt, Artificial Sequence
  Synthetic
ccauguucucauuuauaagu

SEQ ID NO: 819709 - RNA, 20 nt, Artificial Sequence
  Synthetic
ccaauuuuacuuuuauaagu

SEQ ID NO: 819710 - RNA, 20 nt, Artificial Sequence
  Synthetic
cugaaucaaaagcacuaagu

SEQ ID NO: 819711 - RNA, 20 nt, Artificial Sequence
  Synthetic
auuccccuggaggacuaagu

SEQ ID NO: 819712 - RNA, 20 nt, Artificial Sequence
  Synthetic
aaaacacccagcuacuaagu

SEQ ID NO: 819713 - RNA, 20 nt, Artificial Sequence
  Synthetic
agagcuccaaaguacuaagu

SEQ ID NO: 819714 - RNA, 20 nt, Artificial Sequence
  Synthetic
ugugauaugcuaggcuaagu

SEQ ID NO: 819715 - RNA, 20 nt, Artificial Sequence
  Synthetic
aaagcauuagcccucuaagu

SEQ ID NO: 819716 - RNA, 20 nt, Artificial Sequence
  Synthetic
cuagaaaguuaucucuaagu

SEQ ID NO: 819717 - RNA, 20 nt, Artificial Sequence
  Synthetic
cucuucaacauucucuaagu

SEQ ID NO: 819718 - RNA, 20 nt, Artificial Sequence
  Synthetic
ugaugcccuucaaaguaagu

SEQ ID NO: 819719 - RNA, 20 nt, Artificial Sequence
  Synthetic
ucauaacuuugaaaguaagu

SEQ ID NO: 819720 - RNA, 20 nt, Artificial Sequence
  Synthetic
aaaacauuuauaaaguaagu

SEQ ID NO: 819721 - RNA, 20 nt, Artificial Sequence
  Synthetic
ugaaagugaggcaaguaagu

SEQ ID NO: 819722 - RNA, 20 nt, Artificial Sequence
  Synthetic
ugauaauauugugaguaagu

SEQ ID NO: 819723 - RNA, 20 nt, Artificial Sequence
  Synthetic
auauguucucacucguaagu

SEQ ID NO: 819724 - RNA, 20 nt, Artificial Sequence
  Synthetic
cauaaagaggugagguaagu

SEQ ID NO: 819725 - RNA, 20 nt, Artificial Sequence
  Synthetic
aacaugaauuaaggguaagu

SEQ ID NO: 819726 - RNA, 20 nt, Artificial Sequence
  Synthetic
aggaaacaucagggguaagu

SEQ ID NO: 819727 - RNA, 20 nt, Artificial Sequence
  Synthetic
agagaaaauuaaugguaagu

SEQ ID NO: 819728 - RNA, 20 nt, Artificial Sequence
  Synthetic
aggagaaauaugguguaagu

SEQ ID NO: 819729 - RNA, 20 nt, Artificial Sequence
  Synthetic
aaugcuucuauauuguaagu

SEQ ID NO: 819730 - RNA, 20 nt, Artificial Sequence
  Synthetic
ccuucacaucccuuguaagu

SEQ ID NO: 819731 - RNA, 20 nt, Artificial Sequence
  Synthetic
ccuucacaucgcuuguaagu

SEQ ID NO: 819732 - RNA, 20 nt, Artificial Sequence
  Synthetic
cauuuuaaucauuuguaagu

SEQ ID NO: 819733 - RNA, 20 nt, Artificial Sequence
  Synthetic
uuagagaacucuuuguaagu

SEQ ID NO: 819734 - RNA, 20 nt, Artificial Sequence
  Synthetic
aaaccugcuugaaauuaagu

SEQ ID NO: 819735 - RNA, 20 nt, Artificial Sequence
  Synthetic
agauauugcgacaauuaagu

SEQ ID NO: 819736 - RNA, 20 nt, Artificial Sequence
  Synthetic
uucucauuauagaauuaagu

SEQ ID NO: 819737 - RNA, 20 nt, Artificial Sequence
  Synthetic
aauuugucuuuuaauuaagu

SEQ ID NO: 819738 - RNA, 20 nt, Artificial Sequence
  Synthetic
uccagaaauacugauuaagu

SEQ ID NO: 819739 - RNA, 20 nt, Artificial Sequence
  Synthetic
aaauuagaauaauauuaagu

SEQ ID NO: 819740 - RNA, 20 nt, Artificial Sequence
  Synthetic
uacaucugguaauauuaagu

SEQ ID NO: 819741 - RNA, 20 nt, Artificial Sequence
  Synthetic
uacucauuuuuaacuuaagu

SEQ ID NO: 819742 - RNA, 20 nt, Artificial Sequence
  Synthetic
auaauacuggaugcuuaagu

SEQ ID NO: 819743 - RNA, 20 nt, Artificial Sequence
  Synthetic
auguaacugcuaucuuaagu

SEQ ID NO: 819744 - RNA, 20 nt, Artificial Sequence
  Synthetic
acagggcaagaaaguuaagu

SEQ ID NO: 819745 - RNA, 20 nt, Artificial Sequence
  Synthetic
acauuacauuucaguuaagu

SEQ ID NO: 819746 - RNA, 20 nt, Artificial Sequence
  Synthetic
ucauuaucuucacguuaagu

SEQ ID NO: 819747 - RNA, 20 nt, Artificial Sequence
  Synthetic
aguuuggugaaagguuaagu

SEQ ID NO: 819748 - RNA, 20 nt, Artificial Sequence
  Synthetic
agugguucucaaauuuaagu

SEQ ID NO: 819749 - RNA, 20 nt, Artificial Sequence
  Synthetic
auucuuguagaaauuuaagu

SEQ ID NO: 819750 - RNA, 20 nt, Artificial Sequence
  Synthetic
uaccucuauuggauuuaagu

SEQ ID NO: 819751 - RNA, 20 nt, Artificial Sequence
  Synthetic
aaacauuaacugcuuuaagu

SEQ ID NO: 819752 - RNA, 20 nt, Artificial Sequence
  Synthetic
uauaaugcgaauuuuuaagu

SEQ ID NO: 819753 - RNA, 20 nt, Artificial Sequence
  Synthetic
aaguuugagguuuuuuaagu

SEQ ID NO: 819754 - RNA, 20 nt, Artificial Sequence
  Synthetic
aauguuagauuaaaaacagu

SEQ ID NO: 819755 - RNA, 20 nt, Artificial Sequence
  Synthetic
uuuuguaucuucaaaacagu

SEQ ID NO: 819756 - RNA, 20 nt, Artificial Sequence
  Synthetic
aggagguaaaugaaaacagu

SEQ ID NO: 819757 - RNA, 20 nt, Artificial Sequence
  Synthetic
acucaguagcuuaaaacagu

SEQ ID NO: 819758 - RNA, 20 nt, Artificial Sequence
  Synthetic
aacaaacgauuuaaaacagu

SEQ ID NO: 819759 - RNA, 20 nt, Artificial Sequence
  Synthetic
cauuucuacuuuaaaacagu

SEQ ID NO: 819760 - RNA, 20 nt, Artificial Sequence
  Synthetic
caggcagagguugaaacagu

SEQ ID NO: 819761 - RNA, 20 nt, Artificial Sequence
  Synthetic
ucuuaauacaguuaaacagu

SEQ ID NO: 819762 - RNA, 20 nt, Artificial Sequence
  Synthetic
cuccaugcauuuuaaacagu

SEQ ID NO: 819763 - RNA, 20 nt, Artificial Sequence
  Synthetic
acacaaugugauagaacagu

SEQ ID NO: 819764 - RNA, 20 nt, Artificial Sequence
  Synthetic
ugacuuugucgacgaacagu

SEQ ID NO: 819765 - RNA, 20 nt, Artificial Sequence
  Synthetic
auuucauaacuuugaacagu

SEQ ID NO: 819766 - RNA, 20 nt, Artificial Sequence
  Synthetic
aguaaugguucaauaacagu

SEQ ID NO: 819767 - RNA, 20 nt, Artificial Sequence
  Synthetic
augguagcaugaauaacagu

SEQ ID NO: 819768 - RNA, 20 nt, Artificial Sequence
  Synthetic
augccuggcaauauaacagu

SEQ ID NO: 819769 - RNA, 20 nt, Artificial Sequence
  Synthetic
uuucccacgcuucuaacagu

SEQ ID NO: 819770 - RNA, 20 nt, Artificial Sequence
  Synthetic
caagagaaacaaguaacagu

SEQ ID NO: 819771 - RNA, 20 nt, Artificial Sequence
  Synthetic
aucaaaguagugguaacagu

SEQ ID NO: 819772 - RNA, 20 nt, Artificial Sequence
  Synthetic
uaauuagaccuguuaacagu

SEQ ID NO: 819773 - RNA, 20 nt, Artificial Sequence
  Synthetic
ucgcuuugauuuuuaacagu

SEQ ID NO: 819774 - RNA, 20 nt, Artificial Sequence
  Synthetic
aaacaacaggaacacacagu

SEQ ID NO: 819775 - RNA, 20 nt, Artificial Sequence
  Synthetic
ugauauuugcuacacacagu

SEQ ID NO: 819776 - RNA, 20 nt, Artificial Sequence
  Synthetic
ucaaagauagaccacacagu

SEQ ID NO: 819777 - RNA, 20 nt, Artificial Sequence
  Synthetic
aauaauacuugucacacagu

SEQ ID NO: 819778 - RNA, 20 nt, Artificial Sequence
  Synthetic
aauuuuuguggguacacagu

SEQ ID NO: 819779 - RNA, 20 nt, Artificial Sequence
  Synthetic
caggcuugcaucaccacagu

SEQ ID NO: 819780 - RNA, 20 nt, Artificial Sequence
  Synthetic
ccacuccuuguccccacagu

SEQ ID NO: 819781 - RNA, 20 nt, Artificial Sequence
  Synthetic
cccaaacugcuuuccacagu

SEQ ID NO: 819782 - RNA, 20 nt, Artificial Sequence
  Synthetic
aucugagacuacagcacagu

SEQ ID NO: 819783 - RNA, 20 nt, Artificial Sequence
  Synthetic
aaggacuuauuaggcacagu

SEQ ID NO: 819784 - RNA, 20 nt, Artificial Sequence
  Synthetic
ccugagaaguguggcacagu

SEQ ID NO: 819785 - RNA, 20 nt, Artificial Sequence
  Synthetic
ugaauuccaggcugcacagu

SEQ ID NO: 819786 - RNA, 20 nt, Artificial Sequence
  Synthetic
aaaagugcagaguucacagu

SEQ ID NO: 819787 - RNA, 20 nt, Artificial Sequence
  Synthetic
aggcuucacuuguucacagu

SEQ ID NO: 819788 - RNA, 20 nt, Artificial Sequence
  Synthetic
aagauauuccagaagacagu

SEQ ID NO: 819789 - RNA, 20 nt, Artificial Sequence
  Synthetic
aauccugaauuccagacagu

SEQ ID NO: 819790 - RNA, 20 nt, Artificial Sequence
  Synthetic
cgucucuguauucagacagu

SEQ ID NO: 819791 - RNA, 20 nt, Artificial Sequence
  Synthetic
acugggacugguuagacagu

SEQ ID NO: 819792 - RNA, 20 nt, Artificial Sequence
  Synthetic
ucaagaaaggccacgacagu

SEQ ID NO: 819793 - RNA, 20 nt, Artificial Sequence
  Synthetic
ugagaguauaaggggacagu

SEQ ID NO: 819794 - RNA, 20 nt, Artificial Sequence
  Synthetic
aguaaguagagagugacagu

SEQ ID NO: 819795 - RNA, 20 nt, Artificial Sequence
  Synthetic
ucugcccccuuagugacagu

SEQ ID NO: 819796 - RNA, 20 nt, Artificial Sequence
  Synthetic
auccgucuaauauugacagu

SEQ ID NO: 819797 - RNA, 20 nt, Artificial Sequence
  Synthetic
aucugucuaauguugacagu

SEQ ID NO: 819798 - RNA, 20 nt, Artificial Sequence
  Synthetic
agaugccaugaaaauacagu

SEQ ID NO: 819799 - RNA, 20 nt, Artificial Sequence
  Synthetic
uaauaggauuauaauacagu

SEQ ID NO: 819800 - RNA, 20 nt, Artificial Sequence
  Synthetic
aggugccaagaacauacagu

SEQ ID NO: 819801 - RNA, 20 nt, Artificial Sequence
  Synthetic
uuuguuauacuacauacagu

SEQ ID NO: 819802 - RNA, 20 nt, Artificial Sequence
  Synthetic
uaucuuccacaauauacagu

SEQ ID NO: 819803 - RNA, 20 nt, Artificial Sequence
  Synthetic
cacuuacauuagccuacagu

SEQ ID NO: 819804 - RNA, 20 nt, Artificial Sequence
  Synthetic
aauucucugcauucuacagu

SEQ ID NO: 819805 - RNA, 20 nt, Artificial Sequence
  Synthetic
aauuaaaacugaaguacagu

SEQ ID NO: 819806 - RNA, 20 nt, Artificial Sequence
  Synthetic
auauuauaaaaaauuacagu

SEQ ID NO: 819807 - RNA, 20 nt, Artificial Sequence
  Synthetic
cagaagaaacugcuuacagu

SEQ ID NO: 819808 - RNA, 20 nt, Artificial Sequence
  Synthetic
aguaagauguuaguuacagu

SEQ ID NO: 819809 - RNA, 20 nt, Artificial Sequence
  Synthetic
uuuguuuucuugaaaccagu

SEQ ID NO: 819810 - RNA, 20 nt, Artificial Sequence
  Synthetic
uauaccauuucccaaccagu

SEQ ID NO: 819811 - RNA, 20 nt, Artificial Sequence
  Synthetic
ucuguauagauuuaaccagu

SEQ ID NO: 819812 - RNA, 20 nt, Artificial Sequence
  Synthetic
cuugacuacaaugcaccagu

SEQ ID NO: 819813 - RNA, 20 nt, Artificial Sequence
  Synthetic
ccugagugaaaaugaccagu

SEQ ID NO: 819814 - RNA, 20 nt, Artificial Sequence
  Synthetic
ugaucccaggaaguaccagu

SEQ ID NO: 819815 - RNA, 20 nt, Artificial Sequence
  Synthetic
uguugcuuaagccacccagu

SEQ ID NO: 819816 - RNA, 20 nt, Artificial Sequence
  Synthetic
uguuaugggagggacccagu

SEQ ID NO: 819817 - RNA, 20 nt, Artificial Sequence
  Synthetic
ugucaugugagggacccagu

SEQ ID NO: 819818 - RNA, 20 nt, Artificial Sequence
  Synthetic
ugagcauaaauuuacccagu

SEQ ID NO: 819819 - RNA, 20 nt, Artificial Sequence
  Synthetic
ccacuaggcagugccccagu

SEQ ID NO: 819820 - RNA, 20 nt, Artificial Sequence
  Synthetic
cuacuaggcagugccccagu

SEQ ID NO: 819821 - RNA, 20 nt, Artificial Sequence
  Synthetic
ccgcuaggcagugccccagu

SEQ ID NO: 819822 - RNA, 20 nt, Artificial Sequence
  Synthetic
ccauuuagaauuuccccagu

SEQ ID NO: 819823 - RNA, 20 nt, Artificial Sequence
  Synthetic
uccugggaaugcagcccagu

SEQ ID NO: 819824 - RNA, 20 nt, Artificial Sequence
  Synthetic
caaucuaaacuaaucccagu

SEQ ID NO: 819825 - RNA, 20 nt, Artificial Sequence
  Synthetic
uugcuuugccuaaucccagu

SEQ ID NO: 819826 - RNA, 20 nt, Artificial Sequence
  Synthetic
aaagauagccuauucccagu

SEQ ID NO: 819827 - RNA, 20 nt, Artificial Sequence
  Synthetic
uagaaaaucuaagugccagu

SEQ ID NO: 819828 - RNA, 20 nt, Artificial Sequence
  Synthetic
uucaccuucugcuugccagu

SEQ ID NO: 819829 - RNA, 20 nt, Artificial Sequence
  Synthetic
aaaaacaaggugcauccagu

SEQ ID NO: 819830 - RNA, 20 nt, Artificial Sequence
  Synthetic
ugucaugggagggauccagu

SEQ ID NO: 819831 - RNA, 20 nt, Artificial Sequence
  Synthetic
uguugugggagggauccagu

SEQ ID NO: 819832 - RNA, 20 nt, Artificial Sequence
  Synthetic
auguaaucccaguauccagu

SEQ ID NO: 819833 - RNA, 20 nt, Artificial Sequence
  Synthetic
uguuuugucuaguauccagu

SEQ ID NO: 819834 - RNA, 20 nt, Artificial Sequence
  Synthetic
ucuuuuuaaaauuauccagu

SEQ ID NO: 819835 - RNA, 20 nt, Artificial Sequence
  Synthetic
uguguggagaauuauccagu

SEQ ID NO: 819836 - RNA, 20 nt, Artificial Sequence
  Synthetic
cccacccuccccacuccagu

SEQ ID NO: 819837 - RNA, 20 nt, Artificial Sequence
  Synthetic
agacuaauaugaucuccagu

SEQ ID NO: 819838 - RNA, 20 nt, Artificial Sequence
  Synthetic
agagggagcagccguccagu

SEQ ID NO: 819839 - RNA, 20 nt, Artificial Sequence
  Synthetic
ugaauauguauugguccagu

SEQ ID NO: 819840 - RNA, 20 nt, Artificial Sequence
  Synthetic
cacauacaugcauguccagu

SEQ ID NO: 819841 - RNA, 20 nt, Artificial Sequence
  Synthetic
uccauuuucauucuuccagu

SEQ ID NO: 819842 - RNA, 20 nt, Artificial Sequence
  Synthetic
uagaagcuguacuuuccagu

SEQ ID NO: 819843 - RNA, 20 nt, Artificial Sequence
  Synthetic
aucucucuuucaaaagcagu

SEQ ID NO: 819844 - RNA, 20 nt, Artificial Sequence
  Synthetic
cugcuugaaaauaaagcagu

SEQ ID NO: 819845 - RNA, 20 nt, Artificial Sequence
  Synthetic
cauugucugcuccaagcagu

SEQ ID NO: 819846 - RNA, 20 nt, Artificial Sequence
  Synthetic
aauaaugagagucaagcagu

SEQ ID NO: 819847 - RNA, 20 nt, Artificial Sequence
  Synthetic
caguagcaacuggaagcagu

SEQ ID NO: 819848 - RNA, 20 nt, Artificial Sequence
  Synthetic
agagugaaauuugaagcagu

SEQ ID NO: 819849 - RNA, 20 nt, Artificial Sequence
  Synthetic
uucuacuugguuuaagcagu

SEQ ID NO: 819850 - RNA, 20 nt, Artificial Sequence
  Synthetic
ugggauauauacccagcagu

SEQ ID NO: 819851 - RNA, 20 nt, Artificial Sequence
  Synthetic
uuggguauauacccagcagu

SEQ ID NO: 819852 - RNA, 20 nt, Artificial Sequence
  Synthetic
uuuagagugcaugcagcagu

SEQ ID NO: 819853 - RNA, 20 nt, Artificial Sequence
  Synthetic
agugaggaguugagagcagu

SEQ ID NO: 819854 - RNA, 20 nt, Artificial Sequence
  Synthetic
ugcaggagcgugugagcagu

SEQ ID NO: 819855 - RNA, 20 nt, Artificial Sequence
  Synthetic
ucauaaaaaucuauagcagu

SEQ ID NO: 819856 - RNA, 20 nt, Artificial Sequence
  Synthetic
uaaauaauaaaaguagcagu

SEQ ID NO: 819857 - RNA, 20 nt, Artificial Sequence
  Synthetic
aggauaguccaaguagcagu

SEQ ID NO: 819858 - RNA, 20 nt, Artificial Sequence
  Synthetic
acaugacuuucuuuagcagu

SEQ ID NO: 819859 - RNA, 20 nt, Artificial Sequence
  Synthetic
agucuuuccaugaaggcagu

SEQ ID NO: 819860 - RNA, 20 nt, Artificial Sequence
  Synthetic
uaaaccuggcugaaggcagu

SEQ ID NO: 819861 - RNA, 20 nt, Artificial Sequence
  Synthetic
ugucccaguuugaaggcagu

SEQ ID NO: 819862 - RNA, 20 nt, Artificial Sequence
  Synthetic
uguuugcaagaacaggcagu

SEQ ID NO: 819863 - RNA, 20 nt, Artificial Sequence
  Synthetic
uguccugaauugcaggcagu

SEQ ID NO: 819864 - RNA, 20 nt, Artificial Sequence
  Synthetic
acgauuuaaacucaggcagu

SEQ ID NO: 819865 - RNA, 20 nt, Artificial Sequence
  Synthetic
aaauagagaauagaggcagu

SEQ ID NO: 819866 - RNA, 20 nt, Artificial Sequence
  Synthetic
cuuugggaggccgaggcagu

SEQ ID NO: 819867 - RNA, 20 nt, Artificial Sequence
  Synthetic
agggaauauucuugggcagu

SEQ ID NO: 819868 - RNA, 20 nt, Artificial Sequence
  Synthetic
ucacucacaugacuggcagu

SEQ ID NO: 819869 - RNA, 20 nt, Artificial Sequence
  Synthetic
augcugugcucccuggcagu

SEQ ID NO: 819870 - RNA, 20 nt, Artificial Sequence
  Synthetic
uccacuagaccaguggcagu

SEQ ID NO: 819871 - RNA, 20 nt, Artificial Sequence
  Synthetic
uaagacuguagguuggcagu

SEQ ID NO: 819872 - RNA, 20 nt, Artificial Sequence
  Synthetic
accagaucagaaaaugcagu

SEQ ID NO: 819873 - RNA, 20 nt, Artificial Sequence
  Synthetic
acccaaggaccaaaugcagu

SEQ ID NO: 819874 - RNA, 20 nt, Artificial Sequence
  Synthetic
ugaucauuuuuacaugcagu

SEQ ID NO: 819875 - RNA, 20 nt, Artificial Sequence
  Synthetic
ugugaacacagguaugcagu

SEQ ID NO: 819876 - RNA, 20 nt, Artificial Sequence
  Synthetic
caaaaaaggcuaacugcagu

SEQ ID NO: 819877 - RNA, 20 nt, Artificial Sequence
  Synthetic
aggucuuagauaccugcagu

SEQ ID NO: 819878 - RNA, 20 nt, Artificial Sequence
  Synthetic
cucagcuaacaugcugcagu

SEQ ID NO: 819879 - RNA, 20 nt, Artificial Sequence
  Synthetic
uuuucccucauuucugcagu

SEQ ID NO: 819880 - RNA, 20 nt, Artificial Sequence
  Synthetic
uauauaacuggcagugcagu

SEQ ID NO: 819881 - RNA, 20 nt, Artificial Sequence
  Synthetic
aaagucacaaagagugcagu

SEQ ID NO: 819882 - RNA, 20 nt, Artificial Sequence
  Synthetic
auauagccuggaugugcagu

SEQ ID NO: 819883 - RNA, 20 nt, Artificial Sequence
  Synthetic
uuaaaagcauucugugcagu

SEQ ID NO: 819884 - RNA, 20 nt, Artificial Sequence
  Synthetic
aagucaaaucuuauugcagu

SEQ ID NO: 819885 - RNA, 20 nt, Artificial Sequence
  Synthetic
uuuacuuuaucaguugcagu

SEQ ID NO: 819886 - RNA, 20 nt, Artificial Sequence
  Synthetic
auuucuuggcauguugcagu

SEQ ID NO: 819887 - RNA, 20 nt, Artificial Sequence
  Synthetic
uaaaaauugacauuugcagu

SEQ ID NO: 819888 - RNA, 20 nt, Artificial Sequence
  Synthetic
auccaguacaacuuugcagu

SEQ ID NO: 819889 - RNA, 20 nt, Artificial Sequence
  Synthetic
uucccagaaaccuuugcagu

SEQ ID NO: 819890 - RNA, 20 nt, Artificial Sequence
  Synthetic
aaaucucucagguuugcagu

SEQ ID NO: 819891 - RNA, 20 nt, Artificial Sequence
  Synthetic
acacacagaaaaaaaucagu

SEQ ID NO: 819892 - RNA, 20 nt, Artificial Sequence
  Synthetic
ccagcuauuccaaaaucagu

SEQ ID NO: 819893 - RNA, 20 nt, Artificial Sequence
  Synthetic
ucacaaguuaauaaaucagu

SEQ ID NO: 819894 - RNA, 20 nt, Artificial Sequence
  Synthetic
uacauuugaaaacaaucagu

SEQ ID NO: 819895 - RNA, 20 nt, Artificial Sequence
  Synthetic
uuaaccuguuaacaaucagu

SEQ ID NO: 819896 - RNA, 20 nt, Artificial Sequence
  Synthetic
uguaaaaugcaccaaucagu

SEQ ID NO: 819897 - RNA, 20 nt, Artificial Sequence
  Synthetic
ugaaagaauucagaaucagu

SEQ ID NO: 819898 - RNA, 20 nt, Artificial Sequence
  Synthetic
aaagugauuagagaaucagu

SEQ ID NO: 819899 - RNA, 20 nt, Artificial Sequence
  Synthetic
agggaugugaaugaaucagu

SEQ ID NO: 819900 - RNA, 20 nt, Artificial Sequence
  Synthetic
auccuaauaucauaaucagu

SEQ ID NO: 819901 - RNA, 20 nt, Artificial Sequence
  Synthetic
ucuuaugcuucauaaucagu

SEQ ID NO: 819902 - RNA, 20 nt, Artificial Sequence
  Synthetic
uggaggaguuuauaaucagu

SEQ ID NO: 819903 - RNA, 20 nt, Artificial Sequence
  Synthetic
uaaaaaagccguuaaucagu

SEQ ID NO: 819904 - RNA, 20 nt, Artificial Sequence
  Synthetic
ucucugcccaggacaucagu

SEQ ID NO: 819905 - RNA, 20 nt, Artificial Sequence
  Synthetic
acucauggcaggacaucagu

SEQ ID NO: 819906 - RNA, 20 nt, Artificial Sequence
  Synthetic
uauuuaaauagcguaucagu

SEQ ID NO: 819907 - RNA, 20 nt, Artificial Sequence
  Synthetic
uucuaaguauuguuaucagu

SEQ ID NO: 819908 - RNA, 20 nt, Artificial Sequence
  Synthetic
uacauaacauauuuaucagu

SEQ ID NO: 819909 - RNA, 20 nt, Artificial Sequence
  Synthetic
ugaggugucacuuuaucagu

SEQ ID NO: 819910 - RNA, 20 nt, Artificial Sequence
  Synthetic
augggaauuuguuuaucagu

SEQ ID NO: 819911 - RNA, 20 nt, Artificial Sequence
  Synthetic
aggauauauaugaacucagu

SEQ ID NO: 819912 - RNA, 20 nt, Artificial Sequence
  Synthetic
uacuuucucuugaacucagu

SEQ ID NO: 819913 - RNA, 20 nt, Artificial Sequence
  Synthetic
uauaauccuggcuacucagu

SEQ ID NO: 819914 - RNA, 20 nt, Artificial Sequence
  Synthetic
ugaaaaagcauacccucagu

SEQ ID NO: 819915 - RNA, 20 nt, Artificial Sequence
  Synthetic
uuaggcguuaacagcucagu

SEQ ID NO: 819916 - RNA, 20 nt, Artificial Sequence
  Synthetic
uuuauugcauauaucucagu

SEQ ID NO: 819917 - RNA, 20 nt, Artificial Sequence
  Synthetic
cgaugaaaguggcucucagu

SEQ ID NO: 819918 - RNA, 20 nt, Artificial Sequence
  Synthetic
aaucaaguggaguucucagu

SEQ ID NO: 819919 - RNA, 20 nt, Artificial Sequence
  Synthetic
acacuucugaauuucucagu

SEQ ID NO: 819920 - RNA, 20 nt, Artificial Sequence
  Synthetic
aaaacaccaaauaagucagu

SEQ ID NO: 819921 - RNA, 20 nt, Artificial Sequence
  Synthetic
uugaagaagugguagucagu

SEQ ID NO: 819922 - RNA, 20 nt, Artificial Sequence
  Synthetic
caaugucagucaaggucagu

SEQ ID NO: 819923 - RNA, 20 nt, Artificial Sequence
  Synthetic
aagauaaacauaaggucagu

SEQ ID NO: 819924 - RNA, 20 nt, Artificial Sequence
  Synthetic
uacaagaguaaggggucagu

SEQ ID NO: 819925 - RNA, 20 nt, Artificial Sequence
  Synthetic
agaacaguucgauggucagu

SEQ ID NO: 819926 - RNA, 20 nt, Artificial Sequence
  Synthetic
augaauucaaacaugucagu

SEQ ID NO: 819927 - RNA, 20 nt, Artificial Sequence
  Synthetic
ucaucgcaggagcugucagu

SEQ ID NO: 819928 - RNA, 20 nt, Artificial Sequence
  Synthetic
cccagaguuucugugucagu

SEQ ID NO: 819929 - RNA, 20 nt, Artificial Sequence
  Synthetic
auuaacuggugauugucagu

SEQ ID NO: 819930 - RNA, 20 nt, Artificial Sequence
  Synthetic
uuaacaacauuauugucagu

SEQ ID NO: 819931 - RNA, 20 nt, Artificial Sequence
  Synthetic
caaacucauacaaauucagu

SEQ ID NO: 819932 - RNA, 20 nt, Artificial Sequence
  Synthetic
caugcuaugcucaauucagu

SEQ ID NO: 819933 - RNA, 20 nt, Artificial Sequence
  Synthetic
uuucuaaaauagaauucagu

SEQ ID NO: 819934 - RNA, 20 nt, Artificial Sequence
  Synthetic
ucagggugguagaauucagu

SEQ ID NO: 819935 - RNA, 20 nt, Artificial Sequence
  Synthetic
caccauaauguagauucagu

SEQ ID NO: 819936 - RNA, 20 nt, Artificial Sequence
  Synthetic
cacacagacacugauucagu

SEQ ID NO: 819937 - RNA, 20 nt, Artificial Sequence
  Synthetic
cccagagaugcugauucagu

SEQ ID NO: 819938 - RNA, 20 nt, Artificial Sequence
  Synthetic
uuaacugaugcugauucagu

SEQ ID NO: 819939 - RNA, 20 nt, Artificial Sequence
  Synthetic
aaugcagauugugauucagu

SEQ ID NO: 819940 - RNA, 20 nt, Artificial Sequence
  Synthetic
cuuagugcuuuugauucagu

SEQ ID NO: 819941 - RNA, 20 nt, Artificial Sequence
  Synthetic
uuuacaaaacuuuauucagu

SEQ ID NO: 819942 - RNA, 20 nt, Artificial Sequence
  Synthetic
auuuccaaaaugacuucagu

SEQ ID NO: 819943 - RNA, 20 nt, Artificial Sequence
  Synthetic
agcaaugggagcucuucagu

SEQ ID NO: 819944 - RNA, 20 nt, Artificial Sequence
  Synthetic
aaagaggcuggcuguucagu

SEQ ID NO: 819945 - RNA, 20 nt, Artificial Sequence
  Synthetic
aaggagaauacaauuucagu

SEQ ID NO: 819946 - RNA, 20 nt, Artificial Sequence
  Synthetic
uacuuacagcacauuucagu

SEQ ID NO: 819947 - RNA, 20 nt, Artificial Sequence
  Synthetic
agcccaggcuggauuucagu

SEQ ID NO: 819948 - RNA, 20 nt, Artificial Sequence
  Synthetic
uuugauuccucuauuucagu

SEQ ID NO: 819949 - RNA, 20 nt, Artificial Sequence
  Synthetic
ccaagaauuucuguuucagu

SEQ ID NO: 819950 - RNA, 20 nt, Artificial Sequence
  Synthetic
ucauagagaaguguuucagu

SEQ ID NO: 819951 - RNA, 20 nt, Artificial Sequence
  Synthetic
auagauucaaauuuuucagu

SEQ ID NO: 819952 - RNA, 20 nt, Artificial Sequence
  Synthetic
aaggugagacauuuuucagu

SEQ ID NO: 819953 - RNA, 20 nt, Artificial Sequence
  Synthetic
uauguaggauuuuuuucagu

SEQ ID NO: 819954 - RNA, 20 nt, Artificial Sequence
  Synthetic
auucaaaaauagaaaagagu

SEQ ID NO: 819955 - RNA, 20 nt, Artificial Sequence
  Synthetic
aguugacugaggaaaagagu

SEQ ID NO: 819956 - RNA, 20 nt, Artificial Sequence
  Synthetic
auaauuaaaaaagaaagagu

SEQ ID NO: 819957 - RNA, 20 nt, Artificial Sequence
  Synthetic
cagagugguugagaaagagu

SEQ ID NO: 819958 - RNA, 20 nt, Artificial Sequence
  Synthetic
ugaggcuagguggaaagagu

SEQ ID NO: 819959 - RNA, 20 nt, Artificial Sequence
  Synthetic
ucuaagccauaauaaagagu

SEQ ID NO: 819960 - RNA, 20 nt, Artificial Sequence
  Synthetic
acucacaaaagcuaaagagu

SEQ ID NO: 819961 - RNA, 20 nt, Artificial Sequence
  Synthetic
auagaggaggaguaaagagu

SEQ ID NO: 819962 - RNA, 20 nt, Artificial Sequence
  Synthetic
aaaaaugaagggacaagagu

SEQ ID NO: 819963 - RNA, 20 nt, Artificial Sequence
  Synthetic
cuuuuuccagggacaagagu

SEQ ID NO: 819964 - RNA, 20 nt, Artificial Sequence
  Synthetic
uuucccacuuaugcaagagu

SEQ ID NO: 819965 - RNA, 20 nt, Artificial Sequence
  Synthetic
cuaauguuugaaagaagagu

SEQ ID NO: 819966 - RNA, 20 nt, Artificial Sequence
  Synthetic
auauggagaaacagaagagu

SEQ ID NO: 819967 - RNA, 20 nt, Artificial Sequence
  Synthetic
uuuauagagucaggaagagu

SEQ ID NO: 819968 - RNA, 20 nt, Artificial Sequence
  Synthetic
aacacaacaucgggaagagu

SEQ ID NO: 819969 - RNA, 20 nt, Artificial Sequence
  Synthetic
aauauuuuaaugggaagagu

SEQ ID NO: 819970 - RNA, 20 nt, Artificial Sequence
  Synthetic
accuaucuggaaauaagagu

SEQ ID NO: 819971 - RNA, 20 nt, Artificial Sequence
  Synthetic
uuccaagaucagauaagagu

SEQ ID NO: 819972 - RNA, 20 nt, Artificial Sequence
  Synthetic
agccaaugauggauaagagu

SEQ ID NO: 819973 - RNA, 20 nt, Artificial Sequence
  Synthetic
acagauuuugaacuaagagu

SEQ ID NO: 819974 - RNA, 20 nt, Artificial Sequence
  Synthetic
uggaauaauaacguaagagu

SEQ ID NO: 819975 - RNA, 20 nt, Artificial Sequence
  Synthetic
cuuuuucacaguguaagagu

SEQ ID NO: 819976 - RNA, 20 nt, Artificial Sequence
  Synthetic
ccuaaaaugggaaacagagu

SEQ ID NO: 819977 - RNA, 20 nt, Artificial Sequence
  Synthetic
ucuuucugaauaaacagagu

SEQ ID NO: 819978 - RNA, 20 nt, Artificial Sequence
  Synthetic
caguucuuggaacacagagu

SEQ ID NO: 819979 - RNA, 20 nt, Artificial Sequence
  Synthetic
aacagauaaaaccacagagu

SEQ ID NO: 819980 - RNA, 20 nt, Artificial Sequence
  Synthetic
aaaaaugaaacccacagagu

SEQ ID NO: 819981 - RNA, 20 nt, Artificial Sequence
  Synthetic
caggaaaaaaguuccagagu

SEQ ID NO: 819982 - RNA, 20 nt, Artificial Sequence
  Synthetic
uuguagcuguggagcagagu

SEQ ID NO: 819983 - RNA, 20 nt, Artificial Sequence
  Synthetic
aaaguacauuuuagcagagu

SEQ ID NO: 819984 - RNA, 20 nt, Artificial Sequence
  Synthetic
caaauauugagaggcagagu

SEQ ID NO: 819985 - RNA, 20 nt, Artificial Sequence
  Synthetic
agacucagaaggggcagagu

SEQ ID NO: 819986 - RNA, 20 nt, Artificial Sequence
  Synthetic
cuagucugaagaaucagagu

SEQ ID NO: 819987 - RNA, 20 nt, Artificial Sequence
  Synthetic
agccuuaguaagaucagagu

SEQ ID NO: 819988 - RNA, 20 nt, Artificial Sequence
  Synthetic
aaacaaauaugucucagagu

SEQ ID NO: 819989 - RNA, 20 nt, Artificial Sequence
  Synthetic
aucacaaguuuauucagagu

SEQ ID NO: 819990 - RNA, 20 nt, Artificial Sequence
  Synthetic
agaaagcagaauuucagagu

SEQ ID NO: 819991 - RNA, 20 nt, Artificial Sequence
  Synthetic
aaucccugcaguuucagagu

SEQ ID NO: 819992 - RNA, 20 nt, Artificial Sequence
  Synthetic
accuggaccauuuucagagu

SEQ ID NO: 819993 - RNA, 20 nt, Artificial Sequence
  Synthetic
ucacuuuuuaagaagagagu

SEQ ID NO: 819994 - RNA, 20 nt, Artificial Sequence
  Synthetic
ccuacaagccagaagagagu

SEQ ID NO: 819995 - RNA, 20 nt, Artificial Sequence
  Synthetic
ccuacaagcuagaagagagu

SEQ ID NO: 819996 - RNA, 20 nt, Artificial Sequence
  Synthetic
aaauugguaccacagagagu

SEQ ID NO: 819997 - RNA, 20 nt, Artificial Sequence
  Synthetic
aaauugguacugcagagagu

SEQ ID NO: 819998 - RNA, 20 nt, Artificial Sequence
  Synthetic
uacaaacaugugcagagagu

SEQ ID NO: 819999 - RNA, 20 nt, Artificial Sequence
  Synthetic
cgaaagcagagagagagagu

SEQ ID NO: 820000 - RNA, 20 nt, Artificial Sequence
  Synthetic
augaugguuuuugagagagu

SEQ ID NO: 820001 - RNA, 20 nt, Artificial Sequence
  Synthetic
uacaacaaaaucuagagagu

SEQ ID NO: 820002 - RNA, 20 nt, Artificial Sequence
  Synthetic
aaaaucugcaguuagagagu

SEQ ID NO: 820003 - RNA, 20 nt, Artificial Sequence
  Synthetic
uaaacaaggguggggagagu

SEQ ID NO: 820004 - RNA, 20 nt, Artificial Sequence
  Synthetic
cuuuugaauaccuggagagu

SEQ ID NO: 820005 - RNA, 20 nt, Artificial Sequence
  Synthetic
agcuauuuauucuggagagu

SEQ ID NO: 820006 - RNA, 20 nt, Artificial Sequence
  Synthetic
ugaggaaauuguuggagagu

SEQ ID NO: 820007 - RNA, 20 nt, Artificial Sequence
  Synthetic
acacuuaaaaccaugagagu

SEQ ID NO: 820008 - RNA, 20 nt, Artificial Sequence
  Synthetic
aguugagauacagugagagu

SEQ ID NO: 820009 - RNA, 20 nt, Artificial Sequence
  Synthetic
uucccugugugggugagagu

SEQ ID NO: 820010 - RNA, 20 nt, Artificial Sequence
  Synthetic
uaaguggcuaaauugagagu

SEQ ID NO: 820011 - RNA, 20 nt, Artificial Sequence
  Synthetic
agcugauaguaguugagagu

SEQ ID NO: 820012 - RNA, 20 nt, Artificial Sequence
  Synthetic
uaucuaccaagaaauagagu

SEQ ID NO: 820013 - RNA, 20 nt, Artificial Sequence
  Synthetic
acauaugcuuaacauagagu

SEQ ID NO: 820014 - RNA, 20 nt, Artificial Sequence
  Synthetic
aggaaugauagucauagagu

SEQ ID NO: 820015 - RNA, 20 nt, Artificial Sequence
  Synthetic
aaccugaagagaacuagagu

SEQ ID NO: 820016 - RNA, 20 nt, Artificial Sequence
  Synthetic
aaacggaggacuacuagagu

SEQ ID NO: 820017 - RNA, 20 nt, Artificial Sequence
  Synthetic
aaauuggacaucccuagagu

SEQ ID NO: 820018 - RNA, 20 nt, Artificial Sequence
  Synthetic
aaguaagacaauucuagagu

SEQ ID NO: 820019 - RNA, 20 nt, Artificial Sequence
  Synthetic
aauggguaggacaguagagu

SEQ ID NO: 820020 - RNA, 20 nt, Artificial Sequence
  Synthetic
uaauuugguaccaguagagu

SEQ ID NO: 820021 - RNA, 20 nt, Artificial Sequence
  Synthetic
uuuuguauuuuuaguagagu

SEQ ID NO: 820022 - RNA, 20 nt, Artificial Sequence
  Synthetic
ugggaaguaaaagguagagu

SEQ ID NO: 820023 - RNA, 20 nt, Artificial Sequence
  Synthetic
acagaaacugaauguagagu

SEQ ID NO: 820024 - RNA, 20 nt, Artificial Sequence
  Synthetic
auugcccaaggucuuagagu

SEQ ID NO: 820025 - RNA, 20 nt, Artificial Sequence
  Synthetic
uagauagcuuaaguuagagu

SEQ ID NO: 820026 - RNA, 20 nt, Artificial Sequence
  Synthetic
cuucauccaaagguuagagu

SEQ ID NO: 820027 - RNA, 20 nt, Artificial Sequence
  Synthetic
cucuguuuauccuuuagagu

SEQ ID NO: 820028 - RNA, 20 nt, Artificial Sequence
  Synthetic
agggcuccacccucacgagu

SEQ ID NO: 820029 - RNA, 20 nt, Artificial Sequence
  Synthetic
aaaaagcccaacugacgagu

SEQ ID NO: 820030 - RNA, 20 nt, Artificial Sequence
  Synthetic
uuaucagaacuccuacgagu

SEQ ID NO: 820031 - RNA, 20 nt, Artificial Sequence
  Synthetic
agcacuuugggaggccgagu

SEQ ID NO: 820032 - RNA, 20 nt, Artificial Sequence
  Synthetic
agcccaugggcuuugcgagu

SEQ ID NO: 820033 - RNA, 20 nt, Artificial Sequence
  Synthetic
cuggacuuucugggucgagu

SEQ ID NO: 820034 - RNA, 20 nt, Artificial Sequence
  Synthetic
aaaauaaacaccauucgagu

SEQ ID NO: 820035 - RNA, 20 nt, Artificial Sequence
  Synthetic
cuuuaacucucccaaggagu

SEQ ID NO: 820036 - RNA, 20 nt, Artificial Sequence
  Synthetic
augaaggcauuccaaggagu

SEQ ID NO: 820037 - RNA, 20 nt, Artificial Sequence
  Synthetic
ugcugugugcagcaaggagu

SEQ ID NO: 820038 - RNA, 20 nt, Artificial Sequence
  Synthetic
uugcuauugugucaaggagu

SEQ ID NO: 820039 - RNA, 20 nt, Artificial Sequence
  Synthetic
aagaaggagggagaaggagu

SEQ ID NO: 820040 - RNA, 20 nt, Artificial Sequence
  Synthetic
agagugacagacgaaggagu

SEQ ID NO: 820041 - RNA, 20 nt, Artificial Sequence
  Synthetic
aauauuuugauauaaggagu

SEQ ID NO: 820042 - RNA, 20 nt, Artificial Sequence
  Synthetic
uauuguugaauguaaggagu

SEQ ID NO: 820043 - RNA, 20 nt, Artificial Sequence
  Synthetic
uuaaccucaguuuaaggagu

SEQ ID NO: 820044 - RNA, 20 nt, Artificial Sequence
  Synthetic
uccaucaggaaaacaggagu

SEQ ID NO: 820045 - RNA, 20 nt, Artificial Sequence
  Synthetic
agaugccauuuaacaggagu

SEQ ID NO: 820046 - RNA, 20 nt, Artificial Sequence
  Synthetic
auuccaaguuauacaggagu

SEQ ID NO: 820047 - RNA, 20 nt, Artificial Sequence
  Synthetic
aauuucuugagcccaggagu

SEQ ID NO: 820048 - RNA, 20 nt, Artificial Sequence
  Synthetic
cccgauaagaucgcaggagu

SEQ ID NO: 820049 - RNA, 20 nt, Artificial Sequence
  Synthetic
ucuaacuaaaaaucaggagu

SEQ ID NO: 820050 - RNA, 20 nt, Artificial Sequence
  Synthetic
cagaucacgaggucaggagu

SEQ ID NO: 820051 - RNA, 20 nt, Artificial Sequence
  Synthetic
uauggaagguccagaggagu

SEQ ID NO: 820052 - RNA, 20 nt, Artificial Sequence
  Synthetic
auuuuuagaaucagaggagu

SEQ ID NO: 820053 - RNA, 20 nt, Artificial Sequence
  Synthetic
uuccagauguucagaggagu

SEQ ID NO: 820054 - RNA, 20 nt, Artificial Sequence
  Synthetic
caauguguauggagaggagu

SEQ ID NO: 820055 - RNA, 20 nt, Artificial Sequence
  Synthetic
aucagugagacuagaggagu

SEQ ID NO: 820056 - RNA, 20 nt, Artificial Sequence
  Synthetic
aucuuuggcgggggaggagu

SEQ ID NO: 820057 - RNA, 20 nt, Artificial Sequence
  Synthetic
cagagaucagaaauaggagu

SEQ ID NO: 820058 - RNA, 20 nt, Artificial Sequence
  Synthetic
ucuagguuuuugauaggagu

SEQ ID NO: 820059 - RNA, 20 nt, Artificial Sequence
  Synthetic
aguauagcaguuuuaggagu

SEQ ID NO: 820060 - RNA, 20 nt, Artificial Sequence
  Synthetic
uuaguaacccagaagggagu

SEQ ID NO: 820061 - RNA, 20 nt, Artificial Sequence
  Synthetic
aaucacuugaaccagggagu

SEQ ID NO: 820062 - RNA, 20 nt, Artificial Sequence
  Synthetic
aaccgcuugagccagggagu

SEQ ID NO: 820063 - RNA, 20 nt, Artificial Sequence
  Synthetic
aacaguuucauuuagggagu

SEQ ID NO: 820064 - RNA, 20 nt, Artificial Sequence
  Synthetic
uguguguguguggcgggagu

SEQ ID NO: 820065 - RNA, 20 nt, Artificial Sequence
  Synthetic
ucuaggauacauuggggagu

SEQ ID NO: 820066 - RNA, 20 nt, Artificial Sequence
  Synthetic
uaauggguuaucaugggagu

SEQ ID NO: 820067 - RNA, 20 nt, Artificial Sequence
  Synthetic
caagcuucacugcugggagu

SEQ ID NO: 820068 - RNA, 20 nt, Artificial Sequence
  Synthetic
aaugaaauaucucugggagu

SEQ ID NO: 820069 - RNA, 20 nt, Artificial Sequence
  Synthetic
uucuucugcuuggugggagu

SEQ ID NO: 820070 - RNA, 20 nt, Artificial Sequence
  Synthetic
agaguucagggcuugggagu

SEQ ID NO: 820071 - RNA, 20 nt, Artificial Sequence
  Synthetic
uuugugguugguuugggagu

SEQ ID NO: 820072 - RNA, 20 nt, Artificial Sequence
  Synthetic
aaaucagaguuuuugggagu

SEQ ID NO: 820073 - RNA, 20 nt, Artificial Sequence
  Synthetic
uucagagagcacaauggagu

SEQ ID NO: 820074 - RNA, 20 nt, Artificial Sequence
  Synthetic
cagagagagaggaauggagu

SEQ ID NO: 820075 - RNA, 20 nt, Artificial Sequence
  Synthetic
uggggaagugagacuggagu

SEQ ID NO: 820076 - RNA, 20 nt, Artificial Sequence
  Synthetic
cucaguggaauaucuggagu

SEQ ID NO: 820077 - RNA, 20 nt, Artificial Sequence
  Synthetic
aucucaauacugaguggagu

SEQ ID NO: 820078 - RNA, 20 nt, Artificial Sequence
  Synthetic
aaaacgugaguguguggagu

SEQ ID NO: 820079 - RNA, 20 nt, Artificial Sequence
  Synthetic
uggcuccuuuuauuuggagu

SEQ ID NO: 820080 - RNA, 20 nt, Artificial Sequence
  Synthetic
uccaucaauagguuuggagu

SEQ ID NO: 820081 - RNA, 20 nt, Artificial Sequence
  Synthetic
ccacagagugaaaaaugagu

SEQ ID NO: 820082 - RNA, 20 nt, Artificial Sequence
  Synthetic
uuguuagcuaggaaaugagu

SEQ ID NO: 820083 - RNA, 20 nt, Artificial Sequence
  Synthetic
acagcccuugauaaaugagu

SEQ ID NO: 820084 - RNA, 20 nt, Artificial Sequence
  Synthetic
ccaggcauuaaagaaugagu

SEQ ID NO: 820085 - RNA, 20 nt, Artificial Sequence
  Synthetic
agagacccuucagaaugagu

SEQ ID NO: 820086 - RNA, 20 nt, Artificial Sequence
  Synthetic
ccauacaacagauaaugagu

SEQ ID NO: 820087 - RNA, 20 nt, Artificial Sequence
  Synthetic
auacaaagacaaacaugagu

SEQ ID NO: 820088 - RNA, 20 nt, Artificial Sequence
  Synthetic
ucuaugcccagcacaugagu

SEQ ID NO: 820089 - RNA, 20 nt, Artificial Sequence
  Synthetic
ucaugccagaaaagaugagu

SEQ ID NO: 820090 - RNA, 20 nt, Artificial Sequence
  Synthetic
uagcccuuuaucagaugagu

SEQ ID NO: 820091 - RNA, 20 nt, Artificial Sequence
  Synthetic
uagcccuuugucagaugagu

SEQ ID NO: 820092 - RNA, 20 nt, Artificial Sequence
  Synthetic
auucuccuccugagaugagu

SEQ ID NO: 820093 - RNA, 20 nt, Artificial Sequence
  Synthetic
cagggcaucugucuaugagu

SEQ ID NO: 820094 - RNA, 20 nt, Artificial Sequence
  Synthetic
uauuccuugccauuaugagu

SEQ ID NO: 820095 - RNA, 20 nt, Artificial Sequence
  Synthetic
auaaccaggauauuaugagu

SEQ ID NO: 820096 - RNA, 20 nt, Artificial Sequence
  Synthetic
uaaguaaguaaguuaugagu

SEQ ID NO: 820097 - RNA, 20 nt, Artificial Sequence
  Synthetic
auauguacucaguuaugagu

SEQ ID NO: 820098 - RNA, 20 nt, Artificial Sequence
  Synthetic
agguugauaacacacugagu

SEQ ID NO: 820099 - RNA, 20 nt, Artificial Sequence
  Synthetic
cagggaaagccucacugagu

SEQ ID NO: 820100 - RNA, 20 nt, Artificial Sequence
  Synthetic
agaugcucgggaggcugagu

SEQ ID NO: 820101 - RNA, 20 nt, Artificial Sequence
  Synthetic
aacacuuugggaggcugagu

SEQ ID NO: 820102 - RNA, 20 nt, Artificial Sequence
  Synthetic
uuauaaaaauuaggcugagu

SEQ ID NO: 820103 - RNA, 20 nt, Artificial Sequence
  Synthetic
aagaaauagaaaaucugagu

SEQ ID NO: 820104 - RNA, 20 nt, Artificial Sequence
  Synthetic
accagaguaacagucugagu

SEQ ID NO: 820105 - RNA, 20 nt, Artificial Sequence
  Synthetic
cugagaccugaaaagugagu

SEQ ID NO: 820106 - RNA, 20 nt, Artificial Sequence
  Synthetic
accacagacauacagugagu

SEQ ID NO: 820107 - RNA, 20 nt, Artificial Sequence
  Synthetic
aaaauaaaaauggagugagu

SEQ ID NO: 820108 - RNA, 20 nt, Artificial Sequence
  Synthetic
aucuaguugaagaggugagu

SEQ ID NO: 820109 - RNA, 20 nt, Artificial Sequence
  Synthetic
ugcuuuguggggaggugagu

SEQ ID NO: 820110 - RNA, 20 nt, Artificial Sequence
  Synthetic
aucaagaaaugggggugagu

SEQ ID NO: 820111 - RNA, 20 nt, Artificial Sequence
  Synthetic
caaaguugcucugggugagu

SEQ ID NO: 820112 - RNA, 20 nt, Artificial Sequence
  Synthetic
uacaggcuaaaaaugugagu

SEQ ID NO: 820113 - RNA, 20 nt, Artificial Sequence
  Synthetic
auauuuaaaguuaugugagu

SEQ ID NO: 820114 - RNA, 20 nt, Artificial Sequence
  Synthetic
uacuuguauagcuugugagu

SEQ ID NO: 820115 - RNA, 20 nt, Artificial Sequence
  Synthetic
caagaagcucacaauugagu

SEQ ID NO: 820116 - RNA, 20 nt, Artificial Sequence
  Synthetic
uauugaauaaagaauugagu

SEQ ID NO: 820117 - RNA, 20 nt, Artificial Sequence
  Synthetic
aaaugaagucugaauugagu

SEQ ID NO: 820118 - RNA, 20 nt, Artificial Sequence
  Synthetic
uuuuagcccucauauugagu

SEQ ID NO: 820119 - RNA, 20 nt, Artificial Sequence
  Synthetic
cccagcaccguuuauugagu

SEQ ID NO: 820120 - RNA, 20 nt, Artificial Sequence
  Synthetic
agugguucucaaacuugagu

SEQ ID NO: 820121 - RNA, 20 nt, Artificial Sequence
  Synthetic
uucucuaaguacucuugagu

SEQ ID NO: 820122 - RNA, 20 nt, Artificial Sequence
  Synthetic
ucacaagaguacaguugagu

SEQ ID NO: 820123 - RNA, 20 nt, Artificial Sequence
  Synthetic
ucuuuuauuuuccguugagu

SEQ ID NO: 820124 - RNA, 20 nt, Artificial Sequence
  Synthetic
ucuaaguggaacuguugagu

SEQ ID NO: 820125 - RNA, 20 nt, Artificial Sequence
  Synthetic
ugugaugaugacauuugagu

SEQ ID NO: 820126 - RNA, 20 nt, Artificial Sequence
  Synthetic
auucaaaaugagauuugagu

SEQ ID NO: 820127 - RNA, 20 nt, Artificial Sequence
  Synthetic
aauguacacuugauuugagu

SEQ ID NO: 820128 - RNA, 20 nt, Artificial Sequence
  Synthetic
aaaauuuuuuaaaaaauagu

SEQ ID NO: 820129 - RNA, 20 nt, Artificial Sequence
  Synthetic
uacuugacauuaaaaauagu

SEQ ID NO: 820130 - RNA, 20 nt, Artificial Sequence
  Synthetic
ucuaggauauuaaaaauagu

SEQ ID NO: 820131 - RNA, 20 nt, Artificial Sequence
  Synthetic
uagcucuucauuaaaauagu

SEQ ID NO: 820132 - RNA, 20 nt, Artificial Sequence
  Synthetic
cacaaugccuaacaaauagu

SEQ ID NO: 820133 - RNA, 20 nt, Artificial Sequence
  Synthetic
cuguugugcuagcaaauagu

SEQ ID NO: 820134 - RNA, 20 nt, Artificial Sequence
  Synthetic
cuguugugcuaucaaauagu

SEQ ID NO: 820135 - RNA, 20 nt, Artificial Sequence
  Synthetic
uaugguuguuuucaaauagu

SEQ ID NO: 820136 - RNA, 20 nt, Artificial Sequence
  Synthetic
cacaaaaagagagaaauagu

SEQ ID NO: 820137 - RNA, 20 nt, Artificial Sequence
  Synthetic
cuaaaaacacgagaaauagu

SEQ ID NO: 820138 - RNA, 20 nt, Artificial Sequence
  Synthetic
aauuuugccuuauaaauagu

SEQ ID NO: 820139 - RNA, 20 nt, Artificial Sequence
  Synthetic
cagcuguagcuuuaaauagu

SEQ ID NO: 820140 - RNA, 20 nt, Artificial Sequence
  Synthetic
aauuugcauuagucaauagu

SEQ ID NO: 820141 - RNA, 20 nt, Artificial Sequence
  Synthetic
acagacacaugcugaauagu

SEQ ID NO: 820142 - RNA, 20 nt, Artificial Sequence
  Synthetic
uauuucuuaacuugaauagu

SEQ ID NO: 820143 - RNA, 20 nt, Artificial Sequence
  Synthetic
aacuacaguacaauaauagu

SEQ ID NO: 820144 - RNA, 20 nt, Artificial Sequence
  Synthetic
accaaaaauaaccuaauagu

SEQ ID NO: 820145 - RNA, 20 nt, Artificial Sequence
  Synthetic
agaccuaggaagcuaauagu

SEQ ID NO: 820146 - RNA, 20 nt, Artificial Sequence
  Synthetic
uguuaguauaaguuaauagu

SEQ ID NO: 820147 - RNA, 20 nt, Artificial Sequence
  Synthetic
cuaaaccuauuuuuaauagu

SEQ ID NO: 820148 - RNA, 20 nt, Artificial Sequence
  Synthetic
aagagugccuaguacauagu

SEQ ID NO: 820149 - RNA, 20 nt, Artificial Sequence
  Synthetic
aauuuuuugggguacauagu

SEQ ID NO: 820150 - RNA, 20 nt, Artificial Sequence
  Synthetic
uuuuuuuauggguacauagu

SEQ ID NO: 820151 - RNA, 20 nt, Artificial Sequence
  Synthetic
aauuuuuguggguacauagu

SEQ ID NO: 820152 - RNA, 20 nt, Artificial Sequence
  Synthetic
aaaaaaaaaaaaaccauagu

SEQ ID NO: 820153 - RNA, 20 nt, Artificial Sequence
  Synthetic
uuaaaggagcaaaucauagu

SEQ ID NO: 820154 - RNA, 20 nt, Artificial Sequence
  Synthetic
cuagcccucagaaucauagu

SEQ ID NO: 820155 - RNA, 20 nt, Artificial Sequence
  Synthetic
uagauauaguuucucauagu

SEQ ID NO: 820156 - RNA, 20 nt, Artificial Sequence
  Synthetic
auuaugucccuauucauagu

SEQ ID NO: 820157 - RNA, 20 nt, Artificial Sequence
  Synthetic
caucucaucacuuucauagu

SEQ ID NO: 820158 - RNA, 20 nt, Artificial Sequence
  Synthetic
aauacagcaacuaagauagu

SEQ ID NO: 820159 - RNA, 20 nt, Artificial Sequence
  Synthetic
caugcuauucucaugauagu

SEQ ID NO: 820160 - RNA, 20 nt, Artificial Sequence
  Synthetic
auauuaauaucuuugauagu

SEQ ID NO: 820161 - RNA, 20 nt, Artificial Sequence
  Synthetic
uaauucagcaaaaauauagu

SEQ ID NO: 820162 - RNA, 20 nt, Artificial Sequence
  Synthetic
uuuuugacuuaagauauagu

SEQ ID NO: 820163 - RNA, 20 nt, Artificial Sequence
  Synthetic
uuuaguaaucuggauauagu

SEQ ID NO: 820164 - RNA, 20 nt, Artificial Sequence
  Synthetic
aaugcuguaaaauauauagu

SEQ ID NO: 820165 - RNA, 20 nt, Artificial Sequence
  Synthetic
aaggucacuuacuauauagu

SEQ ID NO: 820166 - RNA, 20 nt, Artificial Sequence
  Synthetic
uaguagaagcaguauauagu

SEQ ID NO: 820167 - RNA, 20 nt, Artificial Sequence
  Synthetic
cuguugaucccuuauauagu

SEQ ID NO: 820168 - RNA, 20 nt, Artificial Sequence
  Synthetic
acagcgccugacacuauagu

SEQ ID NO: 820169 - RNA, 20 nt, Artificial Sequence
  Synthetic
aauugguguugaccuauagu

SEQ ID NO: 820170 - RNA, 20 nt, Artificial Sequence
  Synthetic
uaagguauacugccuauagu

SEQ ID NO: 820171 - RNA, 20 nt, Artificial Sequence
  Synthetic
agcagcuuuuauucuauagu

SEQ ID NO: 820172 - RNA, 20 nt, Artificial Sequence
  Synthetic
auacaaccuagauguauagu

SEQ ID NO: 820173 - RNA, 20 nt, Artificial Sequence
  Synthetic
uauacaaacaaaauuauagu

SEQ ID NO: 820174 - RNA, 20 nt, Artificial Sequence
  Synthetic
aucaauguucaaauuauagu

SEQ ID NO: 820175 - RNA, 20 nt, Artificial Sequence
  Synthetic
uguuugaagguauuuauagu

SEQ ID NO: 820176 - RNA, 20 nt, Artificial Sequence
  Synthetic
ugugcaugugucuuuauagu

SEQ ID NO: 820177 - RNA, 20 nt, Artificial Sequence
  Synthetic
agacaacauuguuuuauagu

SEQ ID NO: 820178 - RNA, 20 nt, Artificial Sequence
  Synthetic
caauuuacuagcaaacuagu

SEQ ID NO: 820179 - RNA, 20 nt, Artificial Sequence
  Synthetic
ugauuuacuaaguaacuagu

SEQ ID NO: 820180 - RNA, 20 nt, Artificial Sequence
  Synthetic
aagucaugagacacacuagu

SEQ ID NO: 820181 - RNA, 20 nt, Artificial Sequence
  Synthetic
accuggaaauacgaccuagu

SEQ ID NO: 820182 - RNA, 20 nt, Artificial Sequence
  Synthetic
uuuuuugcuagaccccuagu

SEQ ID NO: 820183 - RNA, 20 nt, Artificial Sequence
  Synthetic
cuuguauaagcuccccuagu

SEQ ID NO: 820184 - RNA, 20 nt, Artificial Sequence
  Synthetic
uuuguauuagccauccuagu

SEQ ID NO: 820185 - RNA, 20 nt, Artificial Sequence
  Synthetic
cauuugaucucacuccuagu

SEQ ID NO: 820186 - RNA, 20 nt, Artificial Sequence
  Synthetic
auaauuuaaauuuagcuagu

SEQ ID NO: 820187 - RNA, 20 nt, Artificial Sequence
  Synthetic
uauucauaagcuuugcuagu

SEQ ID NO: 820188 - RNA, 20 nt, Artificial Sequence
  Synthetic
uuuugaguuuaaaaucuagu

SEQ ID NO: 820189 - RNA, 20 nt, Artificial Sequence
  Synthetic
accaacccuagcaaucuagu

SEQ ID NO: 820190 - RNA, 20 nt, Artificial Sequence
  Synthetic
aguuagcuccuuaaucuagu

SEQ ID NO: 820191 - RNA, 20 nt, Artificial Sequence
  Synthetic
aagaaugcccaauaucuagu

SEQ ID NO: 820192 - RNA, 20 nt, Artificial Sequence
  Synthetic
aaggagauguuaccucuagu

SEQ ID NO: 820193 - RNA, 20 nt, Artificial Sequence
  Synthetic
uuuuuuaugaaaucucuagu

SEQ ID NO: 820194 - RNA, 20 nt, Artificial Sequence
  Synthetic
ugugaaaccuguucucuagu

SEQ ID NO: 820195 - RNA, 20 nt, Artificial Sequence
  Synthetic
agauacaacugaagucuagu

SEQ ID NO: 820196 - RNA, 20 nt, Artificial Sequence
  Synthetic
accguaacuuacauucuagu

SEQ ID NO: 820197 - RNA, 20 nt, Artificial Sequence
  Synthetic
auuggaguuugcauucuagu

SEQ ID NO: 820198 - RNA, 20 nt, Artificial Sequence
  Synthetic
ucaaaggcaugccuucuagu

SEQ ID NO: 820199 - RNA, 20 nt, Artificial Sequence
  Synthetic
auguuuagaaaaguucuagu

SEQ ID NO: 820200 - RNA, 20 nt, Artificial Sequence
  Synthetic
ugaaacauaccaguucuagu

SEQ ID NO: 820201 - RNA, 20 nt, Artificial Sequence
  Synthetic
uuaaacuauuacuuucuagu

SEQ ID NO: 820202 - RNA, 20 nt, Artificial Sequence
  Synthetic
cuauuuuauuauuuucuagu

SEQ ID NO: 820203 - RNA, 20 nt, Artificial Sequence
  Synthetic
uguuaagaucucaaaguagu

SEQ ID NO: 820204 - RNA, 20 nt, Artificial Sequence
  Synthetic
uugguaaagaaagaaguagu

SEQ ID NO: 820205 - RNA, 20 nt, Artificial Sequence
  Synthetic
aggcacauguuauaaguagu

SEQ ID NO: 820206 - RNA, 20 nt, Artificial Sequence
  Synthetic
cugcuucuucacacaguagu

SEQ ID NO: 820207 - RNA, 20 nt, Artificial Sequence
  Synthetic
uuggauaaaugcccaguagu

SEQ ID NO: 820208 - RNA, 20 nt, Artificial Sequence
  Synthetic
aauccuaugaggccaguagu

SEQ ID NO: 820209 - RNA, 20 nt, Artificial Sequence
  Synthetic
aaggguuuugccucaguagu

SEQ ID NO: 820210 - RNA, 20 nt, Artificial Sequence
  Synthetic
cuuuaaaaacacagaguagu

SEQ ID NO: 820211 - RNA, 20 nt, Artificial Sequence
  Synthetic
aaauaagauugcagaguagu

SEQ ID NO: 820212 - RNA, 20 nt, Artificial Sequence
  Synthetic
aaagauaacuacugaguagu

SEQ ID NO: 820213 - RNA, 20 nt, Artificial Sequence
  Synthetic
accucagccuccugaguagu

SEQ ID NO: 820214 - RNA, 20 nt, Artificial Sequence
  Synthetic
agcucugccuccugaguagu

SEQ ID NO: 820215 - RNA, 20 nt, Artificial Sequence
  Synthetic
acauaacaucagugaguagu

SEQ ID NO: 820216 - RNA, 20 nt, Artificial Sequence
  Synthetic
uggcgcacacuuugaguagu

SEQ ID NO: 820217 - RNA, 20 nt, Artificial Sequence
  Synthetic
uuggagguaaaaauaguagu

SEQ ID NO: 820218 - RNA, 20 nt, Artificial Sequence
  Synthetic
auucuggcauugauaguagu

SEQ ID NO: 820219 - RNA, 20 nt, Artificial Sequence
  Synthetic
agaagcaaagacaagguagu

SEQ ID NO: 820220 - RNA, 20 nt, Artificial Sequence
  Synthetic
aguuagaugaagaagguagu

SEQ ID NO: 820221 - RNA, 20 nt, Artificial Sequence
  Synthetic
acaugucauguccagguagu

SEQ ID NO: 820222 - RNA, 20 nt, Artificial Sequence
  Synthetic
cagaggcugugaaggguagu

SEQ ID NO: 820223 - RNA, 20 nt, Artificial Sequence
  Synthetic
auugcccggaagcugguagu

SEQ ID NO: 820224 - RNA, 20 nt, Artificial Sequence
  Synthetic
aauuagccuggcgugguagu

SEQ ID NO: 820225 - RNA, 20 nt, Artificial Sequence
  Synthetic
caaauaaucauaaauguagu

SEQ ID NO: 820226 - RNA, 20 nt, Artificial Sequence
  Synthetic
acagggaaaagucauguagu

SEQ ID NO: 820227 - RNA, 20 nt, Artificial Sequence
  Synthetic
aagauaaauuccuauguagu

SEQ ID NO: 820228 - RNA, 20 nt, Artificial Sequence
  Synthetic
uaaguauuuuucacuguagu

SEQ ID NO: 820229 - RNA, 20 nt, Artificial Sequence
  Synthetic
uccaguaaaugcucuguagu

SEQ ID NO: 820230 - RNA, 20 nt, Artificial Sequence
  Synthetic
aaaaacaaaguuaguguagu

SEQ ID NO: 820231 - RNA, 20 nt, Artificial Sequence
  Synthetic
auguagccuagguguguagu

SEQ ID NO: 820232 - RNA, 20 nt, Artificial Sequence
  Synthetic
augaaauauauuauuguagu

SEQ ID NO: 820233 - RNA, 20 nt, Artificial Sequence
  Synthetic
cucacuucuuuauuuguagu

SEQ ID NO: 820234 - RNA, 20 nt, Artificial Sequence
  Synthetic
cuaaaguacaaaaaauuagu

SEQ ID NO: 820235 - RNA, 20 nt, Artificial Sequence
  Synthetic
cuaaaaauacaaaaauuagu

SEQ ID NO: 820236 - RNA, 20 nt, Artificial Sequence
  Synthetic
uauagagcuacaaaauuagu

SEQ ID NO: 820237 - RNA, 20 nt, Artificial Sequence
  Synthetic
uggacaauacuuaaauuagu

SEQ ID NO: 820238 - RNA, 20 nt, Artificial Sequence
  Synthetic
uguccuacaaaucaauuagu

SEQ ID NO: 820239 - RNA, 20 nt, Artificial Sequence
  Synthetic
cugacucguuuucaauuagu

SEQ ID NO: 820240 - RNA, 20 nt, Artificial Sequence
  Synthetic
auuaucguaaaugaauuagu

SEQ ID NO: 820241 - RNA, 20 nt, Artificial Sequence
  Synthetic
auauugugaauuuaauuagu

SEQ ID NO: 820242 - RNA, 20 nt, Artificial Sequence
  Synthetic
uucccucucaguucauuagu

SEQ ID NO: 820243 - RNA, 20 nt, Artificial Sequence
  Synthetic
uuuaucuuaaacugauuagu

SEQ ID NO: 820244 - RNA, 20 nt, Artificial Sequence
  Synthetic
aaaaauuacuucauauuagu

SEQ ID NO: 820245 - RNA, 20 nt, Artificial Sequence
  Synthetic
uauauucuaagguuauuagu

SEQ ID NO: 820246 - RNA, 20 nt, Artificial Sequence
  Synthetic
ucucuuuuuuuuuuauuagu

SEQ ID NO: 820247 - RNA, 20 nt, Artificial Sequence
  Synthetic
uaggauaacuauaacuuagu

SEQ ID NO: 820248 - RNA, 20 nt, Artificial Sequence
  Synthetic
agauagauuugacccuuagu

SEQ ID NO: 820249 - RNA, 20 nt, Artificial Sequence
  Synthetic
ugucaagaaguugccuuagu

SEQ ID NO: 820250 - RNA, 20 nt, Artificial Sequence
  Synthetic
uagcagcaagauuccuuagu

SEQ ID NO: 820251 - RNA, 20 nt, Artificial Sequence
  Synthetic
ugagagaacauuaucuuagu

SEQ ID NO: 820252 - RNA, 20 nt, Artificial Sequence
  Synthetic
cucugaggguuucucuuagu

SEQ ID NO: 820253 - RNA, 20 nt, Artificial Sequence
  Synthetic
augcuagaugacaaguuagu

SEQ ID NO: 820254 - RNA, 20 nt, Artificial Sequence
  Synthetic
aagcuagaugacgaguuagu

SEQ ID NO: 820255 - RNA, 20 nt, Artificial Sequence
  Synthetic
augcuagaugacgaguuagu

SEQ ID NO: 820256 - RNA, 20 nt, Artificial Sequence
  Synthetic
augcuagaugaugaguuagu

SEQ ID NO: 820257 - RNA, 20 nt, Artificial Sequence
  Synthetic
uuguuguuuuguuaguuagu

SEQ ID NO: 820258 - RNA, 20 nt, Artificial Sequence
  Synthetic
augcuagaugacacguuagu

SEQ ID NO: 820259 - RNA, 20 nt, Artificial Sequence
  Synthetic
augcuagaugacggguuagu

SEQ ID NO: 820260 - RNA, 20 nt, Artificial Sequence
  Synthetic
aaacuguugaauugguuagu

SEQ ID NO: 820261 - RNA, 20 nt, Artificial Sequence
  Synthetic
cacaccuuacuuugguuagu

SEQ ID NO: 820262 - RNA, 20 nt, Artificial Sequence
  Synthetic
uaaggugaauucauguuagu

SEQ ID NO: 820263 - RNA, 20 nt, Artificial Sequence
  Synthetic
uaaauugcccaaaauuuagu

SEQ ID NO: 820264 - RNA, 20 nt, Artificial Sequence
  Synthetic
uauaacaucugacauuuagu

SEQ ID NO: 820265 - RNA, 20 nt, Artificial Sequence
  Synthetic
cuauuucauagagauuuagu

SEQ ID NO: 820266 - RNA, 20 nt, Artificial Sequence
  Synthetic
cccaaaaacucugauuuagu

SEQ ID NO: 820267 - RNA, 20 nt, Artificial Sequence
  Synthetic
cccagagauucugauuuagu

SEQ ID NO: 820268 - RNA, 20 nt, Artificial Sequence
  Synthetic
aauugccgucaauauuuagu

SEQ ID NO: 820269 - RNA, 20 nt, Artificial Sequence
  Synthetic
caaugugcucaguauuuagu

SEQ ID NO: 820270 - RNA, 20 nt, Artificial Sequence
  Synthetic
uuguucagcauuuauuuagu

SEQ ID NO: 820271 - RNA, 20 nt, Artificial Sequence
  Synthetic
acuucuaaauuaacuuuagu

SEQ ID NO: 820272 - RNA, 20 nt, Artificial Sequence
  Synthetic
ugaggguccaagacuuuagu

SEQ ID NO: 820273 - RNA, 20 nt, Artificial Sequence
  Synthetic
agcuacaucaguccuuuagu

SEQ ID NO: 820274 - RNA, 20 nt, Artificial Sequence
  Synthetic
ucuuugaucuguaguuuagu

SEQ ID NO: 820275 - RNA, 20 nt, Artificial Sequence
  Synthetic
uuuggagcugaauguuuagu

SEQ ID NO: 820276 - RNA, 20 nt, Artificial Sequence
  Synthetic
ucuuuacuaccuuguuuagu

SEQ ID NO: 820277 - RNA, 20 nt, Artificial Sequence
  Synthetic
auucaaaggaacauuuuagu

SEQ ID NO: 820278 - RNA, 20 nt, Artificial Sequence
  Synthetic
aguaaauguccuauuuuagu

SEQ ID NO: 820279 - RNA, 20 nt, Artificial Sequence
  Synthetic
auugaaugagcaguuuuagu

SEQ ID NO: 820280 - RNA, 20 nt, Artificial Sequence
  Synthetic
uugccuuuuccuguuuuagu

SEQ ID NO: 820281 - RNA, 20 nt, Artificial Sequence
  Synthetic
aacagugcuucaacaaacgu

SEQ ID NO: 820282 - RNA, 20 nt, Artificial Sequence
  Synthetic
cugaaugguaaugcaaacgu

SEQ ID NO: 820283 - RNA, 20 nt, Artificial Sequence
  Synthetic
ugacacuggaagagaaacgu

SEQ ID NO: 820284 - RNA, 20 nt, Artificial Sequence
  Synthetic
aagcuacugaagggaaacgu

SEQ ID NO: 820285 - RNA, 20 nt, Artificial Sequence
  Synthetic
cagaauaguaacaacaacgu

SEQ ID NO: 820286 - RNA, 20 nt, Artificial Sequence
  Synthetic
aaacagugaaaacagaacgu

SEQ ID NO: 820287 - RNA, 20 nt, Artificial Sequence
  Synthetic
uauuuccugaaucugaacgu

SEQ ID NO: 820288 - RNA, 20 nt, Artificial Sequence
  Synthetic
caggagaaucgcuugaacgu

SEQ ID NO: 820289 - RNA, 20 nt, Artificial Sequence
  Synthetic
uggucccucccacaacacgu

SEQ ID NO: 820290 - RNA, 20 nt, Artificial Sequence
  Synthetic
auuacuuuuucuggacacgu

SEQ ID NO: 820291 - RNA, 20 nt, Artificial Sequence
  Synthetic
uggucucucccuugacacgu

SEQ ID NO: 820292 - RNA, 20 nt, Artificial Sequence
  Synthetic
agauggggguuuuaccacgu

SEQ ID NO: 820293 - RNA, 20 nt, Artificial Sequence
  Synthetic
cucaggugauccacccacgu

SEQ ID NO: 820294 - RNA, 20 nt, Artificial Sequence
  Synthetic
uuugcaucuuccucccacgu

SEQ ID NO: 820295 - RNA, 20 nt, Artificial Sequence
  Synthetic
cagaacaaaucaauccacgu

SEQ ID NO: 820296 - RNA, 20 nt, Artificial Sequence
  Synthetic
acauuaauaauuauccacgu

SEQ ID NO: 820297 - RNA, 20 nt, Artificial Sequence
  Synthetic
uuuuguauacuuguccacgu

SEQ ID NO: 820298 - RNA, 20 nt, Artificial Sequence
  Synthetic
uguuuuuauuuuuuccacgu

SEQ ID NO: 820299 - RNA, 20 nt, Artificial Sequence
  Synthetic
uuuuaucuauguaagcacgu

SEQ ID NO: 820300 - RNA, 20 nt, Artificial Sequence
  Synthetic
acacagugauuaaugcacgu

SEQ ID NO: 820301 - RNA, 20 nt, Artificial Sequence
  Synthetic
ucaccugccaaaggucacgu

SEQ ID NO: 820302 - RNA, 20 nt, Artificial Sequence
  Synthetic
caugugcagauuugucacgu

SEQ ID NO: 820303 - RNA, 20 nt, Artificial Sequence
  Synthetic
cuuaagucaggaauucacgu

SEQ ID NO: 820304 - RNA, 20 nt, Artificial Sequence
  Synthetic
uacaaaacuuagccagacgu

SEQ ID NO: 820305 - RNA, 20 nt, Artificial Sequence
  Synthetic
cuuuaaaaucauauagacgu

SEQ ID NO: 820306 - RNA, 20 nt, Artificial Sequence
  Synthetic
accacuacagggguagacgu

SEQ ID NO: 820307 - RNA, 20 nt, Artificial Sequence
  Synthetic
aggugugaaggaagggacgu

SEQ ID NO: 820308 - RNA, 20 nt, Artificial Sequence
  Synthetic
aggaacaagaaugaugacgu

SEQ ID NO: 820309 - RNA, 20 nt, Artificial Sequence
  Synthetic
ucacacaugggugaugacgu

SEQ ID NO: 820310 - RNA, 20 nt, Artificial Sequence
  Synthetic
uauccaaaaaugaaauacgu

SEQ ID NO: 820311 - RNA, 20 nt, Artificial Sequence
  Synthetic
cuguuuuccagaugauacgu

SEQ ID NO: 820312 - RNA, 20 nt, Artificial Sequence
  Synthetic
auauguucucacugauacgu

SEQ ID NO: 820313 - RNA, 20 nt, Artificial Sequence
  Synthetic
aaagcaaaaauugacuacgu

SEQ ID NO: 820314 - RNA, 20 nt, Artificial Sequence
  Synthetic
aauguacagguuugcuacgu

SEQ ID NO: 820315 - RNA, 20 nt, Artificial Sequence
  Synthetic
auaugcauauauauguacgu

SEQ ID NO: 820316 - RNA, 20 nt, Artificial Sequence
  Synthetic
cacaauuuucaacuguacgu

SEQ ID NO: 820317 - RNA, 20 nt, Artificial Sequence
  Synthetic
aaaacagguaacacuuacgu

SEQ ID NO: 820318 - RNA, 20 nt, Artificial Sequence
  Synthetic
aaauuaacugaggcuuacgu

SEQ ID NO: 820319 - RNA, 20 nt, Artificial Sequence
  Synthetic
cagugcuggccugcuuacgu

SEQ ID NO: 820320 - RNA, 20 nt, Artificial Sequence
  Synthetic
aaaaaggagacacuuuacgu

SEQ ID NO: 820321 - RNA, 20 nt, Artificial Sequence
  Synthetic
uuuugaaaaggaaacaccgu

SEQ ID NO: 820322 - RNA, 20 nt, Artificial Sequence
  Synthetic
caggaacacuuucacaccgu

SEQ ID NO: 820323 - RNA, 20 nt, Artificial Sequence
  Synthetic
agaggccagaagagcaccgu

SEQ ID NO: 820324 - RNA, 20 nt, Artificial Sequence
  Synthetic
cccaggugcccucucaccgu

SEQ ID NO: 820325 - RNA, 20 nt, Artificial Sequence
  Synthetic
uaggaaaauaauucccccgu

SEQ ID NO: 820326 - RNA, 20 nt, Artificial Sequence
  Synthetic
ugacuucagaaggcucccgu

SEQ ID NO: 820327 - RNA, 20 nt, Artificial Sequence
  Synthetic
uuuaauuuagcauaugccgu

SEQ ID NO: 820328 - RNA, 20 nt, Artificial Sequence
  Synthetic
auaaagaauggccacuccgu

SEQ ID NO: 820329 - RNA, 20 nt, Artificial Sequence
  Synthetic
cuuagcuggcugggcuccgu

SEQ ID NO: 820330 - RNA, 20 nt, Artificial Sequence
  Synthetic
aucuuuuauuaaaucuccgu

SEQ ID NO: 820331 - RNA, 20 nt, Artificial Sequence
  Synthetic
aggccucuguucuguuccgu

SEQ ID NO: 820332 - RNA, 20 nt, Artificial Sequence
  Synthetic
uauuuaccccaauuuuccgu

SEQ ID NO: 820333 - RNA, 20 nt, Artificial Sequence
  Synthetic
ucauucaacuugugaagcgu

SEQ ID NO: 820334 - RNA, 20 nt, Artificial Sequence
  Synthetic
acuugcaugcacaccagcgu

SEQ ID NO: 820335 - RNA, 20 nt, Artificial Sequence
  Synthetic
ucagcuugggaggugagcgu

SEQ ID NO: 820336 - RNA, 20 nt, Artificial Sequence
  Synthetic
auuuaaccagugggaggcgu

SEQ ID NO: 820337 - RNA, 20 nt, Artificial Sequence
  Synthetic
accauucaggacauaggcgu

SEQ ID NO: 820338 - RNA, 20 nt, Artificial Sequence
  Synthetic
acccagggcccugguggcgu

SEQ ID NO: 820339 - RNA, 20 nt, Artificial Sequence
  Synthetic
cuggaauaaaauauuggcgu

SEQ ID NO: 820340 - RNA, 20 nt, Artificial Sequence
  Synthetic
uuuguuacauagguaugcgu

SEQ ID NO: 820341 - RNA, 20 nt, Artificial Sequence
  Synthetic
cuuuuuuuuuuuaacugcgu

SEQ ID NO: 820342 - RNA, 20 nt, Artificial Sequence
  Synthetic
augaguggauagaccugcgu

SEQ ID NO: 820343 - RNA, 20 nt, Artificial Sequence
  Synthetic
cuugaauccagaugcugcgu

SEQ ID NO: 820344 - RNA, 20 nt, Artificial Sequence
  Synthetic
aagcauauauuuuggugcgu

SEQ ID NO: 820345 - RNA, 20 nt, Artificial Sequence
  Synthetic
uguuauaauguugguugcgu

SEQ ID NO: 820346 - RNA, 20 nt, Artificial Sequence
  Synthetic
acacacacauauauuugcgu

SEQ ID NO: 820347 - RNA, 20 nt, Artificial Sequence
  Synthetic
caaacagagagccaaaucgu

SEQ ID NO: 820348 - RNA, 20 nt, Artificial Sequence
  Synthetic
uucuaaaaguagccaaucgu

SEQ ID NO: 820349 - RNA, 20 nt, Artificial Sequence
  Synthetic
augguuugugguggaaucgu

SEQ ID NO: 820350 - RNA, 20 nt, Artificial Sequence
  Synthetic
aauuuuuguggguacaucgu

SEQ ID NO: 820351 - RNA, 20 nt, Artificial Sequence
  Synthetic
cacugcaaccuccccaucgu

SEQ ID NO: 820352 - RNA, 20 nt, Artificial Sequence
  Synthetic
aagaaauaauuggucaucgu

SEQ ID NO: 820353 - RNA, 20 nt, Artificial Sequence
  Synthetic
acauuaacaaugaagaucgu

SEQ ID NO: 820354 - RNA, 20 nt, Artificial Sequence
  Synthetic
uuaaaaugacccaaacucgu

SEQ ID NO: 820355 - RNA, 20 nt, Artificial Sequence
  Synthetic
uagcuugcccacaaccucgu

SEQ ID NO: 820356 - RNA, 20 nt, Artificial Sequence
  Synthetic
uguugugggaaggaccucgu

SEQ ID NO: 820357 - RNA, 20 nt, Artificial Sequence
  Synthetic
cacugcaaccuccgccucgu

SEQ ID NO: 820358 - RNA, 20 nt, Artificial Sequence
  Synthetic
aauuuuucacuggggcucgu

SEQ ID NO: 820359 - RNA, 20 nt, Artificial Sequence
  Synthetic
uguggugucuuuguucucgu

SEQ ID NO: 820360 - RNA, 20 nt, Artificial Sequence
  Synthetic
auaaucaaauucaaggucgu

SEQ ID NO: 820361 - RNA, 20 nt, Artificial Sequence
  Synthetic
cugaggaugggaagggucgu

SEQ ID NO: 820362 - RNA, 20 nt, Artificial Sequence
  Synthetic
cacacaccagggccugucgu

SEQ ID NO: 820363 - RNA, 20 nt, Artificial Sequence
  Synthetic
cacacaccggggccugucgu

SEQ ID NO: 820364 - RNA, 20 nt, Artificial Sequence
  Synthetic
cacacacuggggccugucgu

SEQ ID NO: 820365 - RNA, 20 nt, Artificial Sequence
  Synthetic
aaccaugugguuuuugucgu

SEQ ID NO: 820366 - RNA, 20 nt, Artificial Sequence
  Synthetic
ugucuaaaaaucuuauucgu

SEQ ID NO: 820367 - RNA, 20 nt, Artificial Sequence
  Synthetic
uuuuuuuuuuuuugguucgu

SEQ ID NO: 820368 - RNA, 20 nt, Artificial Sequence
  Synthetic
auauuaucugucauguucgu

SEQ ID NO: 820369 - RNA, 20 nt, Artificial Sequence
  Synthetic
aagggcaugcugucuuucgu

SEQ ID NO: 820370 - RNA, 20 nt, Artificial Sequence
  Synthetic
uucccuguuguuuuuuucgu

SEQ ID NO: 820371 - RNA, 20 nt, Artificial Sequence
  Synthetic
agaauggaaagaaaaaaggu

SEQ ID NO: 820372 - RNA, 20 nt, Artificial Sequence
  Synthetic
acuuuaccgaggaaaaaggu

SEQ ID NO: 820373 - RNA, 20 nt, Artificial Sequence
  Synthetic
uaaauacuuuugaaaaaggu

SEQ ID NO: 820374 - RNA, 20 nt, Artificial Sequence
  Synthetic
ucuuauagaaauuaaaaggu

SEQ ID NO: 820375 - RNA, 20 nt, Artificial Sequence
  Synthetic
uugccaaaaccuuaaaaggu

SEQ ID NO: 820376 - RNA, 20 nt, Artificial Sequence
  Synthetic
aauauagcagaaacaaaggu

SEQ ID NO: 820377 - RNA, 20 nt, Artificial Sequence
  Synthetic
uuucuuuuguaaacaaaggu

SEQ ID NO: 820378 - RNA, 20 nt, Artificial Sequence
  Synthetic
uacuuuuuauuuccaaaggu

SEQ ID NO: 820379 - RNA, 20 nt, Artificial Sequence
  Synthetic
cccagcugcuuugcaaaggu

SEQ ID NO: 820380 - RNA, 20 nt, Artificial Sequence
  Synthetic
cugacugccaacagaaaggu

SEQ ID NO: 820381 - RNA, 20 nt, Artificial Sequence
  Synthetic
aaaaguuuguccugaaaggu

SEQ ID NO: 820382 - RNA, 20 nt, Artificial Sequence
  Synthetic
uuuuguauauagugaaaggu

SEQ ID NO: 820383 - RNA, 20 nt, Artificial Sequence
  Synthetic
aguaguaacuguugaaaggu

SEQ ID NO: 820384 - RNA, 20 nt, Artificial Sequence
  Synthetic
cugaugucaaaaauaaaggu

SEQ ID NO: 820385 - RNA, 20 nt, Artificial Sequence
  Synthetic
aaauaugaauaacuaaaggu

SEQ ID NO: 820386 - RNA, 20 nt, Artificial Sequence
  Synthetic
aauuauuuuguguuaaaggu

SEQ ID NO: 820387 - RNA, 20 nt, Artificial Sequence
  Synthetic
uauaaaucuuuuuuaaaggu

SEQ ID NO: 820388 - RNA, 20 nt, Artificial Sequence
  Synthetic
acuuggguaaaacccaaggu

SEQ ID NO: 820389 - RNA, 20 nt, Artificial Sequence
  Synthetic
uaaucaguaaaauccaaggu

SEQ ID NO: 820390 - RNA, 20 nt, Artificial Sequence
  Synthetic
aaagcuccacccagcaaggu

SEQ ID NO: 820391 - RNA, 20 nt, Artificial Sequence
  Synthetic
uugguugaagugagcaaggu

SEQ ID NO: 820392 - RNA, 20 nt, Artificial Sequence
  Synthetic
aggucacgcugaugcaaggu

SEQ ID NO: 820393 - RNA, 20 nt, Artificial Sequence
  Synthetic
uguugaauuucugucaaggu

SEQ ID NO: 820394 - RNA, 20 nt, Artificial Sequence
  Synthetic
cuuguggcuguguucaaggu

SEQ ID NO: 820395 - RNA, 20 nt, Artificial Sequence
  Synthetic
uauacauagaaaaagaaggu

SEQ ID NO: 820396 - RNA, 20 nt, Artificial Sequence
  Synthetic
acccaaggggagaagaaggu

SEQ ID NO: 820397 - RNA, 20 nt, Artificial Sequence
  Synthetic
auuccaguguaagagaaggu

SEQ ID NO: 820398 - RNA, 20 nt, Artificial Sequence
  Synthetic
aucaaagguaaggagaaggu

SEQ ID NO: 820399 - RNA, 20 nt, Artificial Sequence
  Synthetic
agcucugggagguagaaggu

SEQ ID NO: 820400 - RNA, 20 nt, Artificial Sequence
  Synthetic
uugaaauuaagugggaaggu

SEQ ID NO: 820401 - RNA, 20 nt, Artificial Sequence
  Synthetic
ucaaaaaagucaaugaaggu

SEQ ID NO: 820402 - RNA, 20 nt, Artificial Sequence
  Synthetic
auuuaaucuaccuugaaggu

SEQ ID NO: 820403 - RNA, 20 nt, Artificial Sequence
  Synthetic
ugugcucuucucuugaaggu

SEQ ID NO: 820404 - RNA, 20 nt, Artificial Sequence
  Synthetic
cugaguaaauaauauaaggu

SEQ ID NO: 820405 - RNA, 20 nt, Artificial Sequence
  Synthetic
uauuuagaaaucacuaaggu

SEQ ID NO: 820406 - RNA, 20 nt, Artificial Sequence
  Synthetic
uuaucacaggaauguaaggu

SEQ ID NO: 820407 - RNA, 20 nt, Artificial Sequence
  Synthetic
ugauucaguggguguaaggu

SEQ ID NO: 820408 - RNA, 20 nt, Artificial Sequence
  Synthetic
uaguaaaguguguguaaggu

SEQ ID NO: 820409 - RNA, 20 nt, Artificial Sequence
  Synthetic
caaucuaaauauauuaaggu

SEQ ID NO: 820410 - RNA, 20 nt, Artificial Sequence
  Synthetic
aaccacaugcaaaaacaggu

SEQ ID NO: 820411 - RNA, 20 nt, Artificial Sequence
  Synthetic
agaaguauucaggaacaggu

SEQ ID NO: 820412 - RNA, 20 nt, Artificial Sequence
  Synthetic
uuccggguagcugaacaggu

SEQ ID NO: 820413 - RNA, 20 nt, Artificial Sequence
  Synthetic
caaagguaauaaacacaggu

SEQ ID NO: 820414 - RNA, 20 nt, Artificial Sequence
  Synthetic
uagaaaauacucccacaggu

SEQ ID NO: 820415 - RNA, 20 nt, Artificial Sequence
  Synthetic
accugcugauaagcacaggu

SEQ ID NO: 820416 - RNA, 20 nt, Artificial Sequence
  Synthetic
acuggguaagaggcacaggu

SEQ ID NO: 820417 - RNA, 20 nt, Artificial Sequence
  Synthetic
acauguucucacucacaggu

SEQ ID NO: 820418 - RNA, 20 nt, Artificial Sequence
  Synthetic
accuaaaagaaaagacaggu

SEQ ID NO: 820419 - RNA, 20 nt, Artificial Sequence
  Synthetic
auagcaugggccagacaggu

SEQ ID NO: 820420 - RNA, 20 nt, Artificial Sequence
  Synthetic
agguagauagauagacaggu

SEQ ID NO: 820421 - RNA, 20 nt, Artificial Sequence
  Synthetic
auccuuccaguuggacaggu

SEQ ID NO: 820422 - RNA, 20 nt, Artificial Sequence
  Synthetic
uaaaacuuauccugacaggu

SEQ ID NO: 820423 - RNA, 20 nt, Artificial Sequence
  Synthetic
aaaaauucaagucuacaggu

SEQ ID NO: 820424 - RNA, 20 nt, Artificial Sequence
  Synthetic
aaauuuaauaugguacaggu

SEQ ID NO: 820425 - RNA, 20 nt, Artificial Sequence
  Synthetic
acuaaguagguguuacaggu

SEQ ID NO: 820426 - RNA, 20 nt, Artificial Sequence
  Synthetic
auccagaucaauuuacaggu

SEQ ID NO: 820427 - RNA, 20 nt, Artificial Sequence
  Synthetic
cagacaggguuucaccaggu

SEQ ID NO: 820428 - RNA, 20 nt, Artificial Sequence
  Synthetic
ucaggaguuugagaccaggu

SEQ ID NO: 820429 - RNA, 20 nt, Artificial Sequence
  Synthetic
ucuuacucugucacccaggu

SEQ ID NO: 820430 - RNA, 20 nt, Artificial Sequence
  Synthetic
ucucgcuccaucgcccaggu

SEQ ID NO: 820431 - RNA, 20 nt, Artificial Sequence
  Synthetic
ucucgcucugucgcccaggu

SEQ ID NO: 820432 - RNA, 20 nt, Artificial Sequence
  Synthetic
uuuuguuccauugcccaggu

SEQ ID NO: 820433 - RNA, 20 nt, Artificial Sequence
  Synthetic
ucagcagaggagggccaggu

SEQ ID NO: 820434 - RNA, 20 nt, Artificial Sequence
  Synthetic
cucuucucaaaucuccaggu

SEQ ID NO: 820435 - RNA, 20 nt, Artificial Sequence
  Synthetic
ucagcaaaaaagguccaggu

SEQ ID NO: 820436 - RNA, 20 nt, Artificial Sequence
  Synthetic
augaaaguuugcaagcaggu

SEQ ID NO: 820437 - RNA, 20 nt, Artificial Sequence
  Synthetic
uuugggaagcugaggcaggu

SEQ ID NO: 820438 - RNA, 20 nt, Artificial Sequence
  Synthetic
uggggcaauuucuggcaggu

SEQ ID NO: 820439 - RNA, 20 nt, Artificial Sequence
  Synthetic
aaaucagaauuucugcaggu

SEQ ID NO: 820440 - RNA, 20 nt, Artificial Sequence
  Synthetic
auaguuuucguauugcaggu

SEQ ID NO: 820441 - RNA, 20 nt, Artificial Sequence
  Synthetic
auggcauacacaaaucaggu

SEQ ID NO: 820442 - RNA, 20 nt, Artificial Sequence
  Synthetic
ucauucuuugucaaucaggu

SEQ ID NO: 820443 - RNA, 20 nt, Artificial Sequence
  Synthetic
ugaaaaacuacucaucaggu

SEQ ID NO: 820444 - RNA, 20 nt, Artificial Sequence
  Synthetic
aagauuaaaaagacucaggu

SEQ ID NO: 820445 - RNA, 20 nt, Artificial Sequence
  Synthetic
uuucaucucugggcucaggu

SEQ ID NO: 820446 - RNA, 20 nt, Artificial Sequence
  Synthetic
aagagauggguuggucaggu

SEQ ID NO: 820447 - RNA, 20 nt, Artificial Sequence
  Synthetic
agaguacuuggacuucaggu

SEQ ID NO: 820448 - RNA, 20 nt, Artificial Sequence
  Synthetic
uucucccuuaagcuucaggu

SEQ ID NO: 820449 - RNA, 20 nt, Artificial Sequence
  Synthetic
aaggaauaauguuuucaggu

SEQ ID NO: 820450 - RNA, 20 nt, Artificial Sequence
  Synthetic
aaagaagggcaaaaagaggu

SEQ ID NO: 820451 - RNA, 20 nt, Artificial Sequence
  Synthetic
auauucacauucaaagaggu

SEQ ID NO: 820452 - RNA, 20 nt, Artificial Sequence
  Synthetic
uauccauuaagagaagaggu

SEQ ID NO: 820453 - RNA, 20 nt, Artificial Sequence
  Synthetic
uaaugcuuucgagaagaggu

SEQ ID NO: 820454 - RNA, 20 nt, Artificial Sequence
  Synthetic
uguuucuucugugaagaggu

SEQ ID NO: 820455 - RNA, 20 nt, Artificial Sequence
  Synthetic
augugcuaguacuaagaggu

SEQ ID NO: 820456 - RNA, 20 nt, Artificial Sequence
  Synthetic
ugcuauaggagguaagaggu

SEQ ID NO: 820457 - RNA, 20 nt, Artificial Sequence
  Synthetic
uugaacaaaggguaagaggu

SEQ ID NO: 820458 - RNA, 20 nt, Artificial Sequence
  Synthetic
aagaaaaguaauacagaggu

SEQ ID NO: 820459 - RNA, 20 nt, Artificial Sequence
  Synthetic
uucccuaaagauacagaggu

SEQ ID NO: 820460 - RNA, 20 nt, Artificial Sequence
  Synthetic
uaaaucaucaguacagaggu

SEQ ID NO: 820461 - RNA, 20 nt, Artificial Sequence
  Synthetic
ccaaggagaggaagagaggu

SEQ ID NO: 820462 - RNA, 20 nt, Artificial Sequence
  Synthetic
uucucuauuaucagagaggu

SEQ ID NO: 820463 - RNA, 20 nt, Artificial Sequence
  Synthetic
ucccauuuacagagagaggu

SEQ ID NO: 820464 - RNA, 20 nt, Artificial Sequence
  Synthetic
aaaaguagguggagagaggu

SEQ ID NO: 820465 - RNA, 20 nt, Artificial Sequence
  Synthetic
auaauuugugucugagaggu

SEQ ID NO: 820466 - RNA, 20 nt, Artificial Sequence
  Synthetic
uaagcagcuauuugagaggu

SEQ ID NO: 820467 - RNA, 20 nt, Artificial Sequence
  Synthetic
cuaauagauauaauagaggu

SEQ ID NO: 820468 - RNA, 20 nt, Artificial Sequence
  Synthetic
uuuguauuuguaguagaggu

SEQ ID NO: 820469 - RNA, 20 nt, Artificial Sequence
  Synthetic
aagguacugagauuagaggu

SEQ ID NO: 820470 - RNA, 20 nt, Artificial Sequence
  Synthetic
agugugcaagcaaacgaggu

SEQ ID NO: 820471 - RNA, 20 nt, Artificial Sequence
  Synthetic
uagcuauggcuuaacgaggu

SEQ ID NO: 820472 - RNA, 20 nt, Artificial Sequence
  Synthetic
aggcgggcagaucacgaggu

SEQ ID NO: 820473 - RNA, 20 nt, Artificial Sequence
  Synthetic
gcacuuugggaggccgaggu

SEQ ID NO: 820474 - RNA, 20 nt, Artificial Sequence
  Synthetic
acacuuuggggggccgaggu

SEQ ID NO: 820475 - RNA, 20 nt, Artificial Sequence
  Synthetic
accgaggccugucgcgaggu

SEQ ID NO: 820476 - RNA, 20 nt, Artificial Sequence
  Synthetic
caggauggaguaaaggaggu

SEQ ID NO: 820477 - RNA, 20 nt, Artificial Sequence
  Synthetic
aauggaguauuacaggaggu

SEQ ID NO: 820478 - RNA, 20 nt, Artificial Sequence
  Synthetic
uaaagagggaaagaggaggu

SEQ ID NO: 820479 - RNA, 20 nt, Artificial Sequence
  Synthetic
accucggggaaagcggaggu

SEQ ID NO: 820480 - RNA, 20 nt, Artificial Sequence
  Synthetic
uguaagacagagcuggaggu

SEQ ID NO: 820481 - RNA, 20 nt, Artificial Sequence
  Synthetic
cagaagacuucucuggaggu

SEQ ID NO: 820482 - RNA, 20 nt, Artificial Sequence
  Synthetic
uaaucaguauuucuggaggu

SEQ ID NO: 820483 - RNA, 20 nt, Artificial Sequence
  Synthetic
uaaccccugcaaguggaggu

SEQ ID NO: 820484 - RNA, 20 nt, Artificial Sequence
  Synthetic
acaaaggguaguguggaggu

SEQ ID NO: 820485 - RNA, 20 nt, Artificial Sequence
  Synthetic
ugauccucaauauuggaggu

SEQ ID NO: 820486 - RNA, 20 nt, Artificial Sequence
  Synthetic
ugguggugguuauuggaggu

SEQ ID NO: 820487 - RNA, 20 nt, Artificial Sequence
  Synthetic
uaauccccaauguuggaggu

SEQ ID NO: 820488 - RNA, 20 nt, Artificial Sequence
  Synthetic
uaauucccaguguuggaggu

SEQ ID NO: 820489 - RNA, 20 nt, Artificial Sequence
  Synthetic
cccaauggauauuuggaggu

SEQ ID NO: 820490 - RNA, 20 nt, Artificial Sequence
  Synthetic
cugaaaaagcugaaugaggu

SEQ ID NO: 820491 - RNA, 20 nt, Artificial Sequence
  Synthetic
ccuaagagauguaaugaggu

SEQ ID NO: 820492 - RNA, 20 nt, Artificial Sequence
  Synthetic
ugugucucugcacaugaggu

SEQ ID NO: 820493 - RNA, 20 nt, Artificial Sequence
  Synthetic
uuaauauuuuugcaugaggu

SEQ ID NO: 820494 - RNA, 20 nt, Artificial Sequence
  Synthetic
ucugccucccugacugaggu

SEQ ID NO: 820495 - RNA, 20 nt, Artificial Sequence
  Synthetic
acaggcagaccaccugaggu

SEQ ID NO: 820496 - RNA, 20 nt, Artificial Sequence
  Synthetic
ucuucucagaaggcugaggu

SEQ ID NO: 820497 - RNA, 20 nt, Artificial Sequence
  Synthetic
acuacucaggaggcugaggu

SEQ ID NO: 820498 - RNA, 20 nt, Artificial Sequence
  Synthetic
uugucgacuagcucugaggu

SEQ ID NO: 820499 - RNA, 20 nt, Artificial Sequence
  Synthetic
ucaaaugauggcucugaggu

SEQ ID NO: 820500 - RNA, 20 nt, Artificial Sequence
  Synthetic
ccauaauauggaagugaggu

SEQ ID NO: 820501 - RNA, 20 nt, Artificial Sequence
  Synthetic
ccacaacauccuagugaggu

SEQ ID NO: 820502 - RNA, 20 nt, Artificial Sequence
  Synthetic
cauaaggagaaaggugaggu

SEQ ID NO: 820503 - RNA, 20 nt, Artificial Sequence
  Synthetic
cauaaaguagaaggugaggu

SEQ ID NO: 820504 - RNA, 20 nt, Artificial Sequence
  Synthetic
auguccagcaggggugaggu

SEQ ID NO: 820505 - RNA, 20 nt, Artificial Sequence
  Synthetic
aaugucaguuguggugaggu

SEQ ID NO: 820506 - RNA, 20 nt, Artificial Sequence
  Synthetic
auuuuauuggccugugaggu

SEQ ID NO: 820507 - RNA, 20 nt, Artificial Sequence
  Synthetic
cagcaagaauccugugaggu

SEQ ID NO: 820508 - RNA, 20 nt, Artificial Sequence
  Synthetic
aucauauuacucugugaggu

SEQ ID NO: 820509 - RNA, 20 nt, Artificial Sequence
  Synthetic
uuuuguguauggugugaggu

SEQ ID NO: 820510 - RNA, 20 nt, Artificial Sequence
  Synthetic
ugggcugcacugcuugaggu

SEQ ID NO: 820511 - RNA, 20 nt, Artificial Sequence
  Synthetic
uuacagacaccauuugaggu

SEQ ID NO: 820512 - RNA, 20 nt, Artificial Sequence
  Synthetic
uugauguacaauaaauaggu

SEQ ID NO: 820513 - RNA, 20 nt, Artificial Sequence
  Synthetic
auuuuuuuuaacuaauaggu

SEQ ID NO: 820514 - RNA, 20 nt, Artificial Sequence
  Synthetic
uuuugaacauagccauaggu

SEQ ID NO: 820515 - RNA, 20 nt, Artificial Sequence
  Synthetic
uguggagguaggggauaggu

SEQ ID NO: 820516 - RNA, 20 nt, Artificial Sequence
  Synthetic
caaaguaaauauugauaggu

SEQ ID NO: 820517 - RNA, 20 nt, Artificial Sequence
  Synthetic
acccugagucaaauauaggu

SEQ ID NO: 820518 - RNA, 20 nt, Artificial Sequence
  Synthetic
ugauaaguagguauauaggu

SEQ ID NO: 820519 - RNA, 20 nt, Artificial Sequence
  Synthetic
aucaacuaucaacuauaggu

SEQ ID NO: 820520 - RNA, 20 nt, Artificial Sequence
  Synthetic
aaaauccagcucaacuaggu

SEQ ID NO: 820521 - RNA, 20 nt, Artificial Sequence
  Synthetic
uauuuccuguuuaacuaggu

SEQ ID NO: 820522 - RNA, 20 nt, Artificial Sequence
  Synthetic
cuggcugguauauacuaggu

SEQ ID NO: 820523 - RNA, 20 nt, Artificial Sequence
  Synthetic
auuucaaauacaaccuaggu

SEQ ID NO: 820524 - RNA, 20 nt, Artificial Sequence
  Synthetic
ucauuuaagaucuccuaggu

SEQ ID NO: 820525 - RNA, 20 nt, Artificial Sequence
  Synthetic
uuggagcucuacuucuaggu

SEQ ID NO: 820526 - RNA, 20 nt, Artificial Sequence
  Synthetic
ucaacauucucuaaguaggu

SEQ ID NO: 820527 - RNA, 20 nt, Artificial Sequence
  Synthetic
uuugaaaacaaucaguaggu

SEQ ID NO: 820528 - RNA, 20 nt, Artificial Sequence
  Synthetic
augaaagugaauauguaggu

SEQ ID NO: 820529 - RNA, 20 nt, Artificial Sequence
  Synthetic
auuuucuauaauauguaggu

SEQ ID NO: 820530 - RNA, 20 nt, Artificial Sequence
  Synthetic
aggcugggaagaguguaggu

SEQ ID NO: 820531 - RNA, 20 nt, Artificial Sequence
  Synthetic
cccccuguggaauuguaggu

SEQ ID NO: 820532 - RNA, 20 nt, Artificial Sequence
  Synthetic
aaaaaaaaaaaaaauuaggu

SEQ ID NO: 820533 - RNA, 20 nt, Artificial Sequence
  Synthetic
uaaaaauacaaacauuaggu

SEQ ID NO: 820534 - RNA, 20 nt, Artificial Sequence
  Synthetic
aaagucucucaacauuaggu

SEQ ID NO: 820535 - RNA, 20 nt, Artificial Sequence
  Synthetic
uguagucugcaggauuaggu

SEQ ID NO: 820536 - RNA, 20 nt, Artificial Sequence
  Synthetic
auguggaaauaugauuaggu

SEQ ID NO: 820537 - RNA, 20 nt, Artificial Sequence
  Synthetic
uggacugagauauauuaggu

SEQ ID NO: 820538 - RNA, 20 nt, Artificial Sequence
  Synthetic
acugugucuauauauuaggu

SEQ ID NO: 820539 - RNA, 20 nt, Artificial Sequence
  Synthetic
augaaacauuccaguuaggu

SEQ ID NO: 820540 - RNA, 20 nt, Artificial Sequence
  Synthetic
uugcauugguguaguuaggu

SEQ ID NO: 820541 - RNA, 20 nt, Artificial Sequence
  Synthetic
aucccuuacagcuguuaggu

SEQ ID NO: 820542 - RNA, 20 nt, Artificial Sequence
  Synthetic
ugauuugaaugccuuuaggu

SEQ ID NO: 820543 - RNA, 20 nt, Artificial Sequence
  Synthetic
aaauaaagcaaaguuuaggu

SEQ ID NO: 820544 - RNA, 20 nt, Artificial Sequence
  Synthetic
ugauaggguauauuuuaggu

SEQ ID NO: 820545 - RNA, 20 nt, Artificial Sequence
  Synthetic
agagggcgcagaagcacggu

SEQ ID NO: 820546 - RNA, 20 nt, Artificial Sequence
  Synthetic
agcaguuugccuggcacggu

SEQ ID NO: 820547 - RNA, 20 nt, Artificial Sequence
  Synthetic
ccaaaaaggagggagacggu

SEQ ID NO: 820548 - RNA, 20 nt, Artificial Sequence
  Synthetic
aaacuuuagcuuuagacggu

SEQ ID NO: 820549 - RNA, 20 nt, Artificial Sequence
  Synthetic
cauucagauuuaaauacggu

SEQ ID NO: 820550 - RNA, 20 nt, Artificial Sequence
  Synthetic
acuagaauguaaguuacggu

SEQ ID NO: 820551 - RNA, 20 nt, Artificial Sequence
  Synthetic
cagaguugguucccgccggu

SEQ ID NO: 820552 - RNA, 20 nt, Artificial Sequence
  Synthetic
agccuuccauuuugagcggu

SEQ ID NO: 820553 - RNA, 20 nt, Artificial Sequence
  Synthetic
cauucaccagguguggcggu

SEQ ID NO: 820554 - RNA, 20 nt, Artificial Sequence
  Synthetic
uugguugugcgacgugcggu

SEQ ID NO: 820555 - RNA, 20 nt, Artificial Sequence
  Synthetic
agugcuaaagggauaucggu

SEQ ID NO: 820556 - RNA, 20 nt, Artificial Sequence
  Synthetic
uguaaucccagcuacucggu

SEQ ID NO: 820557 - RNA, 20 nt, Artificial Sequence
  Synthetic
uguaaugccagcuacucggu

SEQ ID NO: 820558 - RNA, 20 nt, Artificial Sequence
  Synthetic
uaugugaauuauagcucggu

SEQ ID NO: 820559 - RNA, 20 nt, Artificial Sequence
  Synthetic
uaagaaaaugaagcaagggu

SEQ ID NO: 820560 - RNA, 20 nt, Artificial Sequence
  Synthetic
ccuuuaaauaagggaagggu

SEQ ID NO: 820561 - RNA, 20 nt, Artificial Sequence
  Synthetic
uaccugaugcugggaagggu

SEQ ID NO: 820562 - RNA, 20 nt, Artificial Sequence
  Synthetic
uggaaaacacuuggaagggu

SEQ ID NO: 820563 - RNA, 20 nt, Artificial Sequence
  Synthetic
auagguuugggaugaagggu

SEQ ID NO: 820564 - RNA, 20 nt, Artificial Sequence
  Synthetic
agcauuugauguuuaagggu

SEQ ID NO: 820565 - RNA, 20 nt, Artificial Sequence
  Synthetic
agaacacuuggacacagggu

SEQ ID NO: 820566 - RNA, 20 nt, Artificial Sequence
  Synthetic
uagucagauaugagcagggu

SEQ ID NO: 820567 - RNA, 20 nt, Artificial Sequence
  Synthetic
ugagaguggcuuagcagggu

SEQ ID NO: 820568 - RNA, 20 nt, Artificial Sequence
  Synthetic
uaaaagagucaaaucagggu

SEQ ID NO: 820569 - RNA, 20 nt, Artificial Sequence
  Synthetic
cagaugagcccccagagggu

SEQ ID NO: 820570 - RNA, 20 nt, Artificial Sequence
  Synthetic
acauauaaacuccagagggu

SEQ ID NO: 820571 - RNA, 20 nt, Artificial Sequence
  Synthetic
acucagaagggcgagagggu

SEQ ID NO: 820572 - RNA, 20 nt, Artificial Sequence
  Synthetic
caacaaauaaaggagagggu

SEQ ID NO: 820573 - RNA, 20 nt, Artificial Sequence
  Synthetic
ugugguagcaggaggagggu

SEQ ID NO: 820574 - RNA, 20 nt, Artificial Sequence
  Synthetic
caaggacagacggggagggu

SEQ ID NO: 820575 - RNA, 20 nt, Artificial Sequence
  Synthetic
ccuacuggaguggggagggu

SEQ ID NO: 820576 - RNA, 20 nt, Artificial Sequence
  Synthetic
ucuacucuaggguggagggu

SEQ ID NO: 820577 - RNA, 20 nt, Artificial Sequence
  Synthetic
uucaugguaggguggagggu

SEQ ID NO: 820578 - RNA, 20 nt, Artificial Sequence
  Synthetic
acuauuagaguguggagggu

SEQ ID NO: 820579 - RNA, 20 nt, Artificial Sequence
  Synthetic
ucauaggcauucaugagggu

SEQ ID NO: 820580 - RNA, 20 nt, Artificial Sequence
  Synthetic
aauauaagcuuuaugagggu

SEQ ID NO: 820581 - RNA, 20 nt, Artificial Sequence
  Synthetic
aagauggagaaacugagggu

SEQ ID NO: 820582 - RNA, 20 nt, Artificial Sequence
  Synthetic
agugaagaagugcugagggu

SEQ ID NO: 820583 - RNA, 20 nt, Artificial Sequence
  Synthetic
uugcaacuucucgugagggu

SEQ ID NO: 820584 - RNA, 20 nt, Artificial Sequence
  Synthetic
aggcuuuuuggcuugagggu

SEQ ID NO: 820585 - RNA, 20 nt, Artificial Sequence
  Synthetic
auacuucauuucuugagggu

SEQ ID NO: 820586 - RNA, 20 nt, Artificial Sequence
  Synthetic
uuacuugggaaguugagggu

SEQ ID NO: 820587 - RNA, 20 nt, Artificial Sequence
  Synthetic
cagaacgauguacauagggu

SEQ ID NO: 820588 - RNA, 20 nt, Artificial Sequence
  Synthetic
cauucaguuacagauagggu

SEQ ID NO: 820589 - RNA, 20 nt, Artificial Sequence
  Synthetic
uugauuuuuuuagauagggu

SEQ ID NO: 820590 - RNA, 20 nt, Artificial Sequence
  Synthetic
auguaacaaaugccuagggu

SEQ ID NO: 820591 - RNA, 20 nt, Artificial Sequence
  Synthetic
uggggguggggggcuagggu

SEQ ID NO: 820592 - RNA, 20 nt, Artificial Sequence
  Synthetic
ucccacuagauugcuagggu

SEQ ID NO: 820593 - RNA, 20 nt, Artificial Sequence
  Synthetic
ucucaacaacccucuagggu

SEQ ID NO: 820594 - RNA, 20 nt, Artificial Sequence
  Synthetic
augagggguggggguagggu

SEQ ID NO: 820595 - RNA, 20 nt, Artificial Sequence
  Synthetic
cuuucuaauuucuguagggu

SEQ ID NO: 820596 - RNA, 20 nt, Artificial Sequence
  Synthetic
ucucagaaucccauuagggu

SEQ ID NO: 820597 - RNA, 20 nt, Artificial Sequence
  Synthetic
ugaggggaaaaaguuagggu

SEQ ID NO: 820598 - RNA, 20 nt, Artificial Sequence
  Synthetic
aggugggugggaguuagggu

SEQ ID NO: 820599 - RNA, 20 nt, Artificial Sequence
  Synthetic
caucaccaugaauuuagggu

SEQ ID NO: 820600 - RNA, 20 nt, Artificial Sequence
  Synthetic
auauucaaacauuuuagggu

SEQ ID NO: 820601 - RNA, 20 nt, Artificial Sequence
  Synthetic
uaugaagaaagcucacgggu

SEQ ID NO: 820602 - RNA, 20 nt, Artificial Sequence
  Synthetic
aauuuuuccguggaccgggu

SEQ ID NO: 820603 - RNA, 20 nt, Artificial Sequence
  Synthetic
uuucgcucuguugcccgggu

SEQ ID NO: 820604 - RNA, 20 nt, Artificial Sequence
  Synthetic
aucagcaaaggaaagcgggu

SEQ ID NO: 820605 - RNA, 20 nt, Artificial Sequence
  Synthetic
acugacauacuucuucgggu

SEQ ID NO: 820606 - RNA, 20 nt, Artificial Sequence
  Synthetic
caagcccaaagucaaggggu

SEQ ID NO: 820607 - RNA, 20 nt, Artificial Sequence
  Synthetic
uugugacaguauuaaggggu

SEQ ID NO: 820608 - RNA, 20 nt, Artificial Sequence
  Synthetic
uagcugaaugacacaggggu

SEQ ID NO: 820609 - RNA, 20 nt, Artificial Sequence
  Synthetic
ccuaagacaguagcaggggu

SEQ ID NO: 820610 - RNA, 20 nt, Artificial Sequence
  Synthetic
acuggguaauaggcaggggu

SEQ ID NO: 820611 - RNA, 20 nt, Artificial Sequence
  Synthetic
auucaccaucagucaggggu

SEQ ID NO: 820612 - RNA, 20 nt, Artificial Sequence
  Synthetic
accggggccugucgaggggu

SEQ ID NO: 820613 - RNA, 20 nt, Artificial Sequence
  Synthetic
caucagaaaauaauaggggu

SEQ ID NO: 820614 - RNA, 20 nt, Artificial Sequence
  Synthetic
caaccccuaagacuaggggu

SEQ ID NO: 820615 - RNA, 20 nt, Artificial Sequence
  Synthetic
uuaguaguucagcuaggggu

SEQ ID NO: 820616 - RNA, 20 nt, Artificial Sequence
  Synthetic
caaccccuagucuuaggggu

SEQ ID NO: 820617 - RNA, 20 nt, Artificial Sequence
  Synthetic
acaaggaacuucuuaggggu

SEQ ID NO: 820618 - RNA, 20 nt, Artificial Sequence
  Synthetic
acaaagcuagguuuaggggu

SEQ ID NO: 820619 - RNA, 20 nt, Artificial Sequence
  Synthetic
ugggauguugauagcggggu

SEQ ID NO: 820620 - RNA, 20 nt, Artificial Sequence
  Synthetic
caggcaauuuggcagggggu

SEQ ID NO: 820621 - RNA, 20 nt, Artificial Sequence
  Synthetic
acuggggccugucagggggu

SEQ ID NO: 820622 - RNA, 20 nt, Artificial Sequence
  Synthetic
cugguugggguggcgggggu

SEQ ID NO: 820623 - RNA, 20 nt, Artificial Sequence
  Synthetic
acugaggccugucggggggu

SEQ ID NO: 820624 - RNA, 20 nt, Artificial Sequence
  Synthetic
auuuuuuaaagauggggggu

SEQ ID NO: 820625 - RNA, 20 nt, Artificial Sequence
  Synthetic
ugccaaauaugcuggggggu

SEQ ID NO: 820626 - RNA, 20 nt, Artificial Sequence
  Synthetic
uuggggguuguguggggggu

SEQ ID NO: 820627 - RNA, 20 nt, Artificial Sequence
  Synthetic
uucuuucuuuuuuggggggu

SEQ ID NO: 820628 - RNA, 20 nt, Artificial Sequence
  Synthetic
agugaaguguugcugggggu

SEQ ID NO: 820629 - RNA, 20 nt, Artificial Sequence
  Synthetic
ugggaggccgaggugggggu

SEQ ID NO: 820630 - RNA, 20 nt, Artificial Sequence
  Synthetic
ccaugaugaggggugggggu

SEQ ID NO: 820631 - RNA, 20 nt, Artificial Sequence
  Synthetic
agagaguugguggugggggu

SEQ ID NO: 820632 - RNA, 20 nt, Artificial Sequence
  Synthetic
aauuagccaggugugggggu

SEQ ID NO: 820633 - RNA, 20 nt, Artificial Sequence
  Synthetic
cugcuuucaagauugggggu

SEQ ID NO: 820634 - RNA, 20 nt, Artificial Sequence
  Synthetic
uaugcugggggguugggggu

SEQ ID NO: 820635 - RNA, 20 nt, Artificial Sequence
  Synthetic
aaagcuauuugguugggggu

SEQ ID NO: 820636 - RNA, 20 nt, Artificial Sequence
  Synthetic
cacuggugccuguugggggu

SEQ ID NO: 820637 - RNA, 20 nt, Artificial Sequence
  Synthetic
uuucaaaaaguacauggggu

SEQ ID NO: 820638 - RNA, 20 nt, Artificial Sequence
  Synthetic
agguaauugaaucauggggu

SEQ ID NO: 820639 - RNA, 20 nt, Artificial Sequence
  Synthetic
ucuuuuauugaagauggggu

SEQ ID NO: 820640 - RNA, 20 nt, Artificial Sequence
  Synthetic
aaaaauuucacagauggggu

SEQ ID NO: 820641 - RNA, 20 nt, Artificial Sequence
  Synthetic
uuauaggcacaggauggggu

SEQ ID NO: 820642 - RNA, 20 nt, Artificial Sequence
  Synthetic
cugauuuaguuggauggggu

SEQ ID NO: 820643 - RNA, 20 nt, Artificial Sequence
  Synthetic
ugaugaaugggguauggggu

SEQ ID NO: 820644 - RNA, 20 nt, Artificial Sequence
  Synthetic
cuucauuuauucacuggggu

SEQ ID NO: 820645 - RNA, 20 nt, Artificial Sequence
  Synthetic
uuacuauguuucacuggggu

SEQ ID NO: 820646 - RNA, 20 nt, Artificial Sequence
  Synthetic
auguuggagaugacuggggu

SEQ ID NO: 820647 - RNA, 20 nt, Artificial Sequence
  Synthetic
ugugguguugggccuggggu

SEQ ID NO: 820648 - RNA, 20 nt, Artificial Sequence
  Synthetic
aaaggccagucuccuggggu

SEQ ID NO: 820649 - RNA, 20 nt, Artificial Sequence
  Synthetic
ugguuuccaggggcuggggu

SEQ ID NO: 820650 - RNA, 20 nt, Artificial Sequence
  Synthetic
uuccccccauuggcuggggu

SEQ ID NO: 820651 - RNA, 20 nt, Artificial Sequence
  Synthetic
ugaaucagcaucucuggggu

SEQ ID NO: 820652 - RNA, 20 nt, Artificial Sequence
  Synthetic
aagaccacugacaguggggu

SEQ ID NO: 820653 - RNA, 20 nt, Artificial Sequence
  Synthetic
aauaucucugggaguggggu

SEQ ID NO: 820654 - RNA, 20 nt, Artificial Sequence
  Synthetic
accagggccugucguggggu

SEQ ID NO: 820655 - RNA, 20 nt, Artificial Sequence
  Synthetic
acuggggccugucguggggu

SEQ ID NO: 820656 - RNA, 20 nt, Artificial Sequence
  Synthetic
uucucacucauagguggggu

SEQ ID NO: 820657 - RNA, 20 nt, Artificial Sequence
  Synthetic
ucuggggacugugguggggu

SEQ ID NO: 820658 - RNA, 20 nt, Artificial Sequence
  Synthetic
aaacucaggagauguggggu

SEQ ID NO: 820659 - RNA, 20 nt, Artificial Sequence
  Synthetic
ucuggggacugcuguggggu

SEQ ID NO: 820660 - RNA, 20 nt, Artificial Sequence
  Synthetic
acuggggccugcuguggggu

SEQ ID NO: 820661 - RNA, 20 nt, Artificial Sequence
  Synthetic
uccugaaagcaguguggggu

SEQ ID NO: 820662 - RNA, 20 nt, Artificial Sequence
  Synthetic
aaaauguauguguguggggu

SEQ ID NO: 820663 - RNA, 20 nt, Artificial Sequence
  Synthetic
uuaagaugagauuguggggu

SEQ ID NO: 820664 - RNA, 20 nt, Artificial Sequence
  Synthetic
ccugggaacuguuguggggu

SEQ ID NO: 820665 - RNA, 20 nt, Artificial Sequence
  Synthetic
ucuggggacuguuguggggu

SEQ ID NO: 820666 - RNA, 20 nt, Artificial Sequence
  Synthetic
accagggccuguuguggggu

SEQ ID NO: 820667 - RNA, 20 nt, Artificial Sequence
  Synthetic
accggggccuguuguggggu

SEQ ID NO: 820668 - RNA, 20 nt, Artificial Sequence
  Synthetic
aaaaaagaaagaauuggggu

SEQ ID NO: 820669 - RNA, 20 nt, Artificial Sequence
  Synthetic
acuccacagcaccuuggggu

SEQ ID NO: 820670 - RNA, 20 nt, Artificial Sequence
  Synthetic
cccaauucuucccuuggggu

SEQ ID NO: 820671 - RNA, 20 nt, Artificial Sequence
  Synthetic
ugauuuaguaggcuuggggu

SEQ ID NO: 820672 - RNA, 20 nt, Artificial Sequence
  Synthetic
ucuccauuuggauuuggggu

SEQ ID NO: 820673 - RNA, 20 nt, Artificial Sequence
  Synthetic
auauucuguugauuuggggu

SEQ ID NO: 820674 - RNA, 20 nt, Artificial Sequence
  Synthetic
aacauguugcauaaaugggu

SEQ ID NO: 820675 - RNA, 20 nt, Artificial Sequence
  Synthetic
uuuucagucagcuaaugggu

SEQ ID NO: 820676 - RNA, 20 nt, Artificial Sequence
  Synthetic
auaauggaacucuaaugggu

SEQ ID NO: 820677 - RNA, 20 nt, Artificial Sequence
  Synthetic
aacauuccaugcucaugggu

SEQ ID NO: 820678 - RNA, 20 nt, Artificial Sequence
  Synthetic
aauauuccaugcucaugggu

SEQ ID NO: 820679 - RNA, 20 nt, Artificial Sequence
  Synthetic
aacauuccgugcucaugggu

SEQ ID NO: 820680 - RNA, 20 nt, Artificial Sequence
  Synthetic
cuuauaacuaucucaugggu

SEQ ID NO: 820681 - RNA, 20 nt, Artificial Sequence
  Synthetic
aauacaauucaaagaugggu

SEQ ID NO: 820682 - RNA, 20 nt, Artificial Sequence
  Synthetic
uuaaacucccuaagaugggu

SEQ ID NO: 820683 - RNA, 20 nt, Artificial Sequence
  Synthetic
uggagaccuaagagaugggu

SEQ ID NO: 820684 - RNA, 20 nt, Artificial Sequence
  Synthetic
cuauuauguggaugaugggu

SEQ ID NO: 820685 - RNA, 20 nt, Artificial Sequence
  Synthetic
uuaaaugaguucauaugggu

SEQ ID NO: 820686 - RNA, 20 nt, Artificial Sequence
  Synthetic
auuuaacuacuuauaugggu

SEQ ID NO: 820687 - RNA, 20 nt, Artificial Sequence
  Synthetic
auucugugagccuuaugggu

SEQ ID NO: 820688 - RNA, 20 nt, Artificial Sequence
  Synthetic
aguugcuaagaguuaugggu

SEQ ID NO: 820689 - RNA, 20 nt, Artificial Sequence
  Synthetic
accagucucuuuuuaugggu

SEQ ID NO: 820690 - RNA, 20 nt, Artificial Sequence
  Synthetic
ccugugaccuauaccugggu

SEQ ID NO: 820691 - RNA, 20 nt, Artificial Sequence
  Synthetic
cucugguucugauccugggu

SEQ ID NO: 820692 - RNA, 20 nt, Artificial Sequence
  Synthetic
acaguuccacauggcugggu

SEQ ID NO: 820693 - RNA, 20 nt, Artificial Sequence
  Synthetic
agggauaccaaaugcugggu

SEQ ID NO: 820694 - RNA, 20 nt, Artificial Sequence
  Synthetic
cuaugagucaggaucugggu

SEQ ID NO: 820695 - RNA, 20 nt, Artificial Sequence
  Synthetic
ugaaaacagggagucugggu

SEQ ID NO: 820696 - RNA, 20 nt, Artificial Sequence
  Synthetic
aaugcuucuggcaagugggu

SEQ ID NO: 820697 - RNA, 20 nt, Artificial Sequence
  Synthetic
auacaggcuagggagugggu

SEQ ID NO: 820698 - RNA, 20 nt, Artificial Sequence
  Synthetic
uuauuuuccguugagugggu

SEQ ID NO: 820699 - RNA, 20 nt, Artificial Sequence
  Synthetic
caaauaacagagaggugggu

SEQ ID NO: 820700 - RNA, 20 nt, Artificial Sequence
  Synthetic
cagcuauuugagaggugggu

SEQ ID NO: 820701 - RNA, 20 nt, Artificial Sequence
  Synthetic
uuugggaggccgaggugggu

SEQ ID NO: 820702 - RNA, 20 nt, Artificial Sequence
  Synthetic
aaaaugaagcaagggugggu

SEQ ID NO: 820703 - RNA, 20 nt, Artificial Sequence
  Synthetic
uauuugagaggugggugggu

SEQ ID NO: 820704 - RNA, 20 nt, Artificial Sequence
  Synthetic
uuacccuccacaaugugggu

SEQ ID NO: 820705 - RNA, 20 nt, Artificial Sequence
  Synthetic
aaaaacuugaacaugugggu

SEQ ID NO: 820706 - RNA, 20 nt, Artificial Sequence
  Synthetic
uuggaaauucuucugugggu

SEQ ID NO: 820707 - RNA, 20 nt, Artificial Sequence
  Synthetic
uuguucucccuugugugggu

SEQ ID NO: 820708 - RNA, 20 nt, Artificial Sequence
  Synthetic
uuagugaagaguuugugggu

SEQ ID NO: 820709 - RNA, 20 nt, Artificial Sequence
  Synthetic
cacagcagaaucaauugggu

SEQ ID NO: 820710 - RNA, 20 nt, Artificial Sequence
  Synthetic
ucugucccucagcauugggu

SEQ ID NO: 820711 - RNA, 20 nt, Artificial Sequence
  Synthetic
uggucgauggacacuugggu

SEQ ID NO: 820712 - RNA, 20 nt, Artificial Sequence
  Synthetic
aauauauaacuaccuugggu

SEQ ID NO: 820713 - RNA, 20 nt, Artificial Sequence
  Synthetic
accuucuucuccccuugggu

SEQ ID NO: 820714 - RNA, 20 nt, Artificial Sequence
  Synthetic
caugaauuuucagcuugggu

SEQ ID NO: 820715 - RNA, 20 nt, Artificial Sequence
  Synthetic
uauaccaugcagucuugggu

SEQ ID NO: 820716 - RNA, 20 nt, Artificial Sequence
  Synthetic
cuauguauaugauguugggu

SEQ ID NO: 820717 - RNA, 20 nt, Artificial Sequence
  Synthetic
uuuuuuuugcauuguugggu

SEQ ID NO: 820718 - RNA, 20 nt, Artificial Sequence
  Synthetic
uucauccuuuguuguugggu

SEQ ID NO: 820719 - RNA, 20 nt, Artificial Sequence
  Synthetic
ucauugucggacauuugggu

SEQ ID NO: 820720 - RNA, 20 nt, Artificial Sequence
  Synthetic
ucacugauggacauuugggu

SEQ ID NO: 820721 - RNA, 20 nt, Artificial Sequence
  Synthetic
uagcugauggacauuugggu

SEQ ID NO: 820722 - RNA, 20 nt, Artificial Sequence
  Synthetic
ucauugauggacauuugggu

SEQ ID NO: 820723 - RNA, 20 nt, Artificial Sequence
  Synthetic
uuauugauggacauuugggu

SEQ ID NO: 820724 - RNA, 20 nt, Artificial Sequence
  Synthetic
ucacuguuggacauuugggu

SEQ ID NO: 820725 - RNA, 20 nt, Artificial Sequence
  Synthetic
ucauuguuggacauuugggu

SEQ ID NO: 820726 - RNA, 20 nt, Artificial Sequence
  Synthetic
ucauugaugagcauuugggu

SEQ ID NO: 820727 - RNA, 20 nt, Artificial Sequence
  Synthetic
ucauugaugggcauuugggu

SEQ ID NO: 820728 - RNA, 20 nt, Artificial Sequence
  Synthetic
ucacuggugggcauuugggu

SEQ ID NO: 820729 - RNA, 20 nt, Artificial Sequence
  Synthetic
cuccaguaacagauuugggu

SEQ ID NO: 820730 - RNA, 20 nt, Artificial Sequence
  Synthetic
auucaaaaugagauuugggu

SEQ ID NO: 820731 - RNA, 20 nt, Artificial Sequence
  Synthetic
auucagaaugagauuugggu

SEQ ID NO: 820732 - RNA, 20 nt, Artificial Sequence
  Synthetic
auucaagaugagauuugggu

SEQ ID NO: 820733 - RNA, 20 nt, Artificial Sequence
  Synthetic
auuuaauaugagauuugggu

SEQ ID NO: 820734 - RNA, 20 nt, Artificial Sequence
  Synthetic
auucaaggugagauuugggu

SEQ ID NO: 820735 - RNA, 20 nt, Artificial Sequence
  Synthetic
auucaagacgggauuugggu

SEQ ID NO: 820736 - RNA, 20 nt, Artificial Sequence
  Synthetic
auagccucagggcuuugggu

SEQ ID NO: 820737 - RNA, 20 nt, Artificial Sequence
  Synthetic
uuuucugcaauaguuugggu

SEQ ID NO: 820738 - RNA, 20 nt, Artificial Sequence
  Synthetic
ccucauccucuuaaaauggu

SEQ ID NO: 820739 - RNA, 20 nt, Artificial Sequence
  Synthetic
caaggugaucaacaaauggu

SEQ ID NO: 820740 - RNA, 20 nt, Artificial Sequence
  Synthetic
agaacauacucucaaauggu

SEQ ID NO: 820741 - RNA, 20 nt, Artificial Sequence
  Synthetic
aaaauacaugaagaaauggu

SEQ ID NO: 820742 - RNA, 20 nt, Artificial Sequence
  Synthetic
ugcauuucaauagaaauggu

SEQ ID NO: 820743 - RNA, 20 nt, Artificial Sequence
  Synthetic
uggucagacauggaaauggu

SEQ ID NO: 820744 - RNA, 20 nt, Artificial Sequence
  Synthetic
ugcucuacuucuuaaauggu

SEQ ID NO: 820745 - RNA, 20 nt, Artificial Sequence
  Synthetic
auugcauguaaugcaauggu

SEQ ID NO: 820746 - RNA, 20 nt, Artificial Sequence
  Synthetic
auauaucuugugucaauggu

SEQ ID NO: 820747 - RNA, 20 nt, Artificial Sequence
  Synthetic
ugaaagaaaacgagaauggu

SEQ ID NO: 820748 - RNA, 20 nt, Artificial Sequence
  Synthetic
agagaugagcuuggaauggu

SEQ ID NO: 820749 - RNA, 20 nt, Artificial Sequence
  Synthetic
aggcuugauaaaauaauggu

SEQ ID NO: 820750 - RNA, 20 nt, Artificial Sequence
  Synthetic
aguaaaaauccuuuaauggu

SEQ ID NO: 820751 - RNA, 20 nt, Artificial Sequence
  Synthetic
caacauuuaucaaacauggu

SEQ ID NO: 820752 - RNA, 20 nt, Artificial Sequence
  Synthetic
uaagccacguuacacauggu

SEQ ID NO: 820753 - RNA, 20 nt, Artificial Sequence
  Synthetic
uuuugagacucucacauggu

SEQ ID NO: 820754 - RNA, 20 nt, Artificial Sequence
  Synthetic
uucaguacaguauacauggu

SEQ ID NO: 820755 - RNA, 20 nt, Artificial Sequence
  Synthetic
uaucuuugugaguacauggu

SEQ ID NO: 820756 - RNA, 20 nt, Artificial Sequence
  Synthetic
ucgguguguccuuacauggu

SEQ ID NO: 820757 - RNA, 20 nt, Artificial Sequence
  Synthetic
ccuuugccuuccaccauggu

SEQ ID NO: 820758 - RNA, 20 nt, Artificial Sequence
  Synthetic
cuugguucuguugccauggu

SEQ ID NO: 820759 - RNA, 20 nt, Artificial Sequence
  Synthetic
uucagcauagaauccauggu

SEQ ID NO: 820760 - RNA, 20 nt, Artificial Sequence
  Synthetic
ccugggguagugggcauggu

SEQ ID NO: 820761 - RNA, 20 nt, Artificial Sequence
  Synthetic
auugcugggaucugcauggu

SEQ ID NO: 820762 - RNA, 20 nt, Artificial Sequence
  Synthetic
aaauaugacugucucauggu

SEQ ID NO: 820763 - RNA, 20 nt, Artificial Sequence
  Synthetic
cugauuuuuaguuagauggu

SEQ ID NO: 820764 - RNA, 20 nt, Artificial Sequence
  Synthetic
ugucaccaagucaggauggu

SEQ ID NO: 820765 - RNA, 20 nt, Artificial Sequence
  Synthetic
uauguuuaaauaaugauggu

SEQ ID NO: 820766 - RNA, 20 nt, Artificial Sequence
  Synthetic
aauuagcugggcaugauggu

SEQ ID NO: 820767 - RNA, 20 nt, Artificial Sequence
  Synthetic
aaacuuccaaggaugauggu

SEQ ID NO: 820768 - RNA, 20 nt, Artificial Sequence
  Synthetic
uccaggcacagccugauggu

SEQ ID NO: 820769 - RNA, 20 nt, Artificial Sequence
  Synthetic
uucaaugacuagcauauggu

SEQ ID NO: 820770 - RNA, 20 nt, Artificial Sequence
  Synthetic
auuucaaaugcucauauggu

SEQ ID NO: 820771 - RNA, 20 nt, Artificial Sequence
  Synthetic
cagcgggaaggucauauggu

SEQ ID NO: 820772 - RNA, 20 nt, Artificial Sequence
  Synthetic
cuuccccaaggguauauggu

SEQ ID NO: 820773 - RNA, 20 nt, Artificial Sequence
  Synthetic
ucuuuuaaacaaacuauggu

SEQ ID NO: 820774 - RNA, 20 nt, Artificial Sequence
  Synthetic
uaguucaggguuccuauggu

SEQ ID NO: 820775 - RNA, 20 nt, Artificial Sequence
  Synthetic
uuuuacccaucagcuauggu

SEQ ID NO: 820776 - RNA, 20 nt, Artificial Sequence
  Synthetic
uucuuauaaugaucuauggu

SEQ ID NO: 820777 - RNA, 20 nt, Artificial Sequence
  Synthetic
ugguagaauaguaguauggu

SEQ ID NO: 820778 - RNA, 20 nt, Artificial Sequence
  Synthetic
acauguaggggagguauggu

SEQ ID NO: 820779 - RNA, 20 nt, Artificial Sequence
  Synthetic
ugcauagggugagguauggu

SEQ ID NO: 820780 - RNA, 20 nt, Artificial Sequence
  Synthetic
uuugaucucuuuuguauggu

SEQ ID NO: 820781 - RNA, 20 nt, Artificial Sequence
  Synthetic
uguaaacaaaauauuauggu

SEQ ID NO: 820782 - RNA, 20 nt, Artificial Sequence
  Synthetic
ccucacuuccauauuauggu

SEQ ID NO: 820783 - RNA, 20 nt, Artificial Sequence
  Synthetic
cuucuucuucuucuuauggu

SEQ ID NO: 820784 - RNA, 20 nt, Artificial Sequence
  Synthetic
uacuuuagugcaaaacuggu

SEQ ID NO: 820785 - RNA, 20 nt, Artificial Sequence
  Synthetic
uguaaacucuauaaacuggu

SEQ ID NO: 820786 - RNA, 20 nt, Artificial Sequence
  Synthetic
acaguugccuaagaacuggu

SEQ ID NO: 820787 - RNA, 20 nt, Artificial Sequence
  Synthetic
ucauucaauccaccacuggu

SEQ ID NO: 820788 - RNA, 20 nt, Artificial Sequence
  Synthetic
uuauccagucuaucacuggu

SEQ ID NO: 820789 - RNA, 20 nt, Artificial Sequence
  Synthetic
uuucaacaaguuggacuggu

SEQ ID NO: 820790 - RNA, 20 nt, Artificial Sequence
  Synthetic
ugcauuuaguugaaccuggu

SEQ ID NO: 820791 - RNA, 20 nt, Artificial Sequence
  Synthetic
ugucaugggagugaccuggu

SEQ ID NO: 820792 - RNA, 20 nt, Artificial Sequence
  Synthetic
acaugucuaccauaccuggu

SEQ ID NO: 820793 - RNA, 20 nt, Artificial Sequence
  Synthetic
auggcugcuuggacccuggu

SEQ ID NO: 820794 - RNA, 20 nt, Artificial Sequence
  Synthetic
ucaccucuuaggucccuggu

SEQ ID NO: 820795 - RNA, 20 nt, Artificial Sequence
  Synthetic
uucauuaaaguaggccuggu

SEQ ID NO: 820796 - RNA, 20 nt, Artificial Sequence
  Synthetic
uguuggaggcagggccuggu

SEQ ID NO: 820797 - RNA, 20 nt, Artificial Sequence
  Synthetic
uguuggagguggggccuggu

SEQ ID NO: 820798 - RNA, 20 nt, Artificial Sequence
  Synthetic
uguccuugcuugggccuggu

SEQ ID NO: 820799 - RNA, 20 nt, Artificial Sequence
  Synthetic
ugugagccaccaugccuggu

SEQ ID NO: 820800 - RNA, 20 nt, Artificial Sequence
  Synthetic
aauccuaaaacaauccuggu

SEQ ID NO: 820801 - RNA, 20 nt, Artificial Sequence
  Synthetic
cauuuacaaacacuccuggu

SEQ ID NO: 820802 - RNA, 20 nt, Artificial Sequence
  Synthetic
aaaauauuaaaguuccuggu

SEQ ID NO: 820803 - RNA, 20 nt, Artificial Sequence
  Synthetic
ugaaacauuucuuuccuggu

SEQ ID NO: 820804 - RNA, 20 nt, Artificial Sequence
  Synthetic
uagcugaguucucagcuggu

SEQ ID NO: 820805 - RNA, 20 nt, Artificial Sequence
  Synthetic
uuucuugucuuucagcuggu

SEQ ID NO: 820806 - RNA, 20 nt, Artificial Sequence
  Synthetic
acaguaauuggagagcuggu

SEQ ID NO: 820807 - RNA, 20 nt, Artificial Sequence
  Synthetic
cuuugggauggcaggcuggu

SEQ ID NO: 820808 - RNA, 20 nt, Artificial Sequence
  Synthetic
cuuccuuauuuauggcuggu

SEQ ID NO: 820809 - RNA, 20 nt, Artificial Sequence
  Synthetic
acacuuaacacacugcuggu

SEQ ID NO: 820810 - RNA, 20 nt, Artificial Sequence
  Synthetic
uaaauuguacagcugcuggu

SEQ ID NO: 820811 - RNA, 20 nt, Artificial Sequence
  Synthetic
aauuagccgggugugcuggu

SEQ ID NO: 820812 - RNA, 20 nt, Artificial Sequence
  Synthetic
aaagcagcaaacuugcuggu

SEQ ID NO: 820813 - RNA, 20 nt, Artificial Sequence
  Synthetic
uguacuagcugguaucuggu

SEQ ID NO: 820814 - RNA, 20 nt, Artificial Sequence
  Synthetic
caugcuagugucucucuggu

SEQ ID NO: 820815 - RNA, 20 nt, Artificial Sequence
  Synthetic
augguuacagacugucuggu

SEQ ID NO: 820816 - RNA, 20 nt, Artificial Sequence
  Synthetic
uuuugacuuuucauucuggu

SEQ ID NO: 820817 - RNA, 20 nt, Artificial Sequence
  Synthetic
uaaauuucaaugauucuggu

SEQ ID NO: 820818 - RNA, 20 nt, Artificial Sequence
  Synthetic
aaauauguuuaauuucuggu

SEQ ID NO: 820819 - RNA, 20 nt, Artificial Sequence
  Synthetic
uacaaaaagcuauuucuggu

SEQ ID NO: 820820 - RNA, 20 nt, Artificial Sequence
  Synthetic
uagauuuuguucuuucuggu

SEQ ID NO: 820821 - RNA, 20 nt, Artificial Sequence
  Synthetic
ccucagccucccaaaguggu

SEQ ID NO: 820822 - RNA, 20 nt, Artificial Sequence
  Synthetic
acuuuacaaaaacaaguggu

SEQ ID NO: 820823 - RNA, 20 nt, Artificial Sequence
  Synthetic
aagcacuuuaaugaaguggu

SEQ ID NO: 820824 - RNA, 20 nt, Artificial Sequence
  Synthetic
aaaagaauuaaauaaguggu

SEQ ID NO: 820825 - RNA, 20 nt, Artificial Sequence
  Synthetic
cugaugccgcacacaguggu

SEQ ID NO: 820826 - RNA, 20 nt, Artificial Sequence
  Synthetic
ugaucaaaagcugcaguggu

SEQ ID NO: 820827 - RNA, 20 nt, Artificial Sequence
  Synthetic
caccugaggguuucaguggu

SEQ ID NO: 820828 - RNA, 20 nt, Artificial Sequence
  Synthetic
uuauguugaauacgaguggu

SEQ ID NO: 820829 - RNA, 20 nt, Artificial Sequence
  Synthetic
ugaauguggugaggaguggu

SEQ ID NO: 820830 - RNA, 20 nt, Artificial Sequence
  Synthetic
aaaacucagaauggaguggu

SEQ ID NO: 820831 - RNA, 20 nt, Artificial Sequence
  Synthetic
ucagacuaggguggaguggu

SEQ ID NO: 820832 - RNA, 20 nt, Artificial Sequence
  Synthetic
aaagaggaauuaauaguggu

SEQ ID NO: 820833 - RNA, 20 nt, Artificial Sequence
  Synthetic
agacugggaaggguaguggu

SEQ ID NO: 820834 - RNA, 20 nt, Artificial Sequence
  Synthetic
agccccgaaaugguaguggu

SEQ ID NO: 820835 - RNA, 20 nt, Artificial Sequence
  Synthetic
uagcauacuuuacacguggu

SEQ ID NO: 820836 - RNA, 20 nt, Artificial Sequence
  Synthetic
cagguuuggggggacguggu

SEQ ID NO: 820837 - RNA, 20 nt, Artificial Sequence
  Synthetic
uuugcucauugaaucguggu

SEQ ID NO: 820838 - RNA, 20 nt, Artificial Sequence
  Synthetic
uugagcaaaguccucguggu

SEQ ID NO: 820839 - RNA, 20 nt, Artificial Sequence
  Synthetic
cucaaacuuuuucagguggu

SEQ ID NO: 820840 - RNA, 20 nt, Artificial Sequence
  Synthetic
ugguuuuauuaugagguggu

SEQ ID NO: 820841 - RNA, 20 nt, Artificial Sequence
  Synthetic
auaaauauuuguaggguggu

SEQ ID NO: 820842 - RNA, 20 nt, Artificial Sequence
  Synthetic
augcucgcuaccuggguggu

SEQ ID NO: 820843 - RNA, 20 nt, Artificial Sequence
  Synthetic
aauuagccaggcaugguggu

SEQ ID NO: 820844 - RNA, 20 nt, Artificial Sequence
  Synthetic
aauuagcagggcaugguggu

SEQ ID NO: 820845 - RNA, 20 nt, Artificial Sequence
  Synthetic
aauuagccgggcaugguggu

SEQ ID NO: 820846 - RNA, 20 nt, Artificial Sequence
  Synthetic
aaauagcugggcaugguggu

SEQ ID NO: 820847 - RNA, 20 nt, Artificial Sequence
  Synthetic
aauuagcugggcaugguggu

SEQ ID NO: 820848 - RNA, 20 nt, Artificial Sequence
  Synthetic
aaauagcuaggagugguggu

SEQ ID NO: 820849 - RNA, 20 nt, Artificial Sequence
  Synthetic
aauuagccaggcgugguggu

SEQ ID NO: 820850 - RNA, 20 nt, Artificial Sequence
  Synthetic
aauuagcagggcgugguggu

SEQ ID NO: 820851 - RNA, 20 nt, Artificial Sequence
  Synthetic
aauuagccgggcgugguggu

SEQ ID NO: 820852 - RNA, 20 nt, Artificial Sequence
  Synthetic
aauuagcugggcgugguggu

SEQ ID NO: 820853 - RNA, 20 nt, Artificial Sequence
  Synthetic
ucuccuuuuggggugguggu

SEQ ID NO: 820854 - RNA, 20 nt, Artificial Sequence
  Synthetic
uaucuguauauggugguggu

SEQ ID NO: 820855 - RNA, 20 nt, Artificial Sequence
  Synthetic
cauuagccaggugugguggu

SEQ ID NO: 820856 - RNA, 20 nt, Artificial Sequence
  Synthetic
aauuagccgggugugguggu

SEQ ID NO: 820857 - RNA, 20 nt, Artificial Sequence
  Synthetic
aauuagcugggugugguggu

SEQ ID NO: 820858 - RNA, 20 nt, Artificial Sequence
  Synthetic
ugacaauacugauugguggu

SEQ ID NO: 820859 - RNA, 20 nt, Artificial Sequence
  Synthetic
agagagagagaguugguggu

SEQ ID NO: 820860 - RNA, 20 nt, Artificial Sequence
  Synthetic
uaauucccaauguugguggu

SEQ ID NO: 820861 - RNA, 20 nt, Artificial Sequence
  Synthetic
uauuuuuaucaccauguggu

SEQ ID NO: 820862 - RNA, 20 nt, Artificial Sequence
  Synthetic
auuuucaagggggauguggu

SEQ ID NO: 820863 - RNA, 20 nt, Artificial Sequence
  Synthetic
ugaaacuguuaugauguggu

SEQ ID NO: 820864 - RNA, 20 nt, Artificial Sequence
  Synthetic
ugguuuuauauguauguggu

SEQ ID NO: 820865 - RNA, 20 nt, Artificial Sequence
  Synthetic
uuaaauauuuauuauguggu

SEQ ID NO: 820866 - RNA, 20 nt, Artificial Sequence
  Synthetic
cacacucuggggacuguggu

SEQ ID NO: 820867 - RNA, 20 nt, Artificial Sequence
  Synthetic
acuggauuuguuccuguggu

SEQ ID NO: 820868 - RNA, 20 nt, Artificial Sequence
  Synthetic
ugauucuaggaagcuguggu

SEQ ID NO: 820869 - RNA, 20 nt, Artificial Sequence
  Synthetic
uaaaucagaaucucuguggu

SEQ ID NO: 820870 - RNA, 20 nt, Artificial Sequence
  Synthetic
ugauauguaucuucuguggu

SEQ ID NO: 820871 - RNA, 20 nt, Artificial Sequence
  Synthetic
caugguuggccaaguguggu

SEQ ID NO: 820872 - RNA, 20 nt, Artificial Sequence
  Synthetic
aaaauacuugauaguguggu

SEQ ID NO: 820873 - RNA, 20 nt, Artificial Sequence
  Synthetic
uuuaagagagaagguguggu

SEQ ID NO: 820874 - RNA, 20 nt, Artificial Sequence
  Synthetic
acccaaugauuggguguggu

SEQ ID NO: 820875 - RNA, 20 nt, Artificial Sequence
  Synthetic
ucugggaucaagauuguggu

SEQ ID NO: 820876 - RNA, 20 nt, Artificial Sequence
  Synthetic
aaaauacagggccuuguggu

SEQ ID NO: 820877 - RNA, 20 nt, Artificial Sequence
  Synthetic
aagagagaauugguuguggu

SEQ ID NO: 820878 - RNA, 20 nt, Artificial Sequence
  Synthetic
auuuuccuguauguuguggu

SEQ ID NO: 820879 - RNA, 20 nt, Artificial Sequence
  Synthetic
aucaaaaaacuauuuguggu

SEQ ID NO: 820880 - RNA, 20 nt, Artificial Sequence
  Synthetic
aauaacuuguuauuuguggu

SEQ ID NO: 820881 - RNA, 20 nt, Artificial Sequence
  Synthetic
cugaaagcuuuguuuguggu

SEQ ID NO: 820882 - RNA, 20 nt, Artificial Sequence
  Synthetic
ucucaacaacauuuuguggu

SEQ ID NO: 820883 - RNA, 20 nt, Artificial Sequence
  Synthetic
auuaaauuagcuuuuguggu

SEQ ID NO: 820884 - RNA, 20 nt, Artificial Sequence
  Synthetic
uauauagaagugaaauuggu

SEQ ID NO: 820885 - RNA, 20 nt, Artificial Sequence
  Synthetic
aaaugcauuucuaaauuggu

SEQ ID NO: 820886 - RNA, 20 nt, Artificial Sequence
  Synthetic
uuugcacgcauuacauuggu

SEQ ID NO: 820887 - RNA, 20 nt, Artificial Sequence
  Synthetic
aacacuuguauaucauuggu

SEQ ID NO: 820888 - RNA, 20 nt, Artificial Sequence
  Synthetic
uucuuuauccacucauuggu

SEQ ID NO: 820889 - RNA, 20 nt, Artificial Sequence
  Synthetic
uuccugggugcuucauuggu

SEQ ID NO: 820890 - RNA, 20 nt, Artificial Sequence
  Synthetic
uaacauagauaaaacuuggu

SEQ ID NO: 820891 - RNA, 20 nt, Artificial Sequence
  Synthetic
agggguggguugcgcuuggu

SEQ ID NO: 820892 - RNA, 20 nt, Artificial Sequence
  Synthetic
agcaguuucuucugcuuggu

SEQ ID NO: 820893 - RNA, 20 nt, Artificial Sequence
  Synthetic
cuuuaugguuuaaucuuggu

SEQ ID NO: 820894 - RNA, 20 nt, Artificial Sequence
  Synthetic
aggcuuuagcuauucuuggu

SEQ ID NO: 820895 - RNA, 20 nt, Artificial Sequence
  Synthetic
acaucuuuuaccuucuuggu

SEQ ID NO: 820896 - RNA, 20 nt, Artificial Sequence
  Synthetic
ugugaagaucauuucuuggu

SEQ ID NO: 820897 - RNA, 20 nt, Artificial Sequence
  Synthetic
uuucaagccacaaaguuggu

SEQ ID NO: 820898 - RNA, 20 nt, Artificial Sequence
  Synthetic
ugaaauaaacauaaguuggu

SEQ ID NO: 820899 - RNA, 20 nt, Artificial Sequence
  Synthetic
aaaauuaaugguaaguuggu

SEQ ID NO: 820900 - RNA, 20 nt, Artificial Sequence
  Synthetic
ugcaagaacaggcaguuggu

SEQ ID NO: 820901 - RNA, 20 nt, Artificial Sequence
  Synthetic
auacuuugcuuauaguuggu

SEQ ID NO: 820902 - RNA, 20 nt, Artificial Sequence
  Synthetic
aacacuuucacaccguuggu

SEQ ID NO: 820903 - RNA, 20 nt, Artificial Sequence
  Synthetic
aagguaaggagaagguuggu

SEQ ID NO: 820904 - RNA, 20 nt, Artificial Sequence
  Synthetic
aaguagguauauagguuggu

SEQ ID NO: 820905 - RNA, 20 nt, Artificial Sequence
  Synthetic
uuucaagauuggggguuggu

SEQ ID NO: 820906 - RNA, 20 nt, Artificial Sequence
  Synthetic
cugggcuuuuuuugguuggu

SEQ ID NO: 820907 - RNA, 20 nt, Artificial Sequence
  Synthetic
uuauugaauuagauguuggu

SEQ ID NO: 820908 - RNA, 20 nt, Artificial Sequence
  Synthetic
aaaccuugcacacuguuggu

SEQ ID NO: 820909 - RNA, 20 nt, Artificial Sequence
  Synthetic
aacacuucuacacuguuggu

SEQ ID NO: 820910 - RNA, 20 nt, Artificial Sequence
  Synthetic
aacacucuuacacuguuggu

SEQ ID NO: 820911 - RNA, 20 nt, Artificial Sequence
  Synthetic
aacacuuuuacacuguuggu

SEQ ID NO: 820912 - RNA, 20 nt, Artificial Sequence
  Synthetic
aacgcuuuuacacuguuggu

SEQ ID NO: 820913 - RNA, 20 nt, Artificial Sequence
  Synthetic
ugugcuuuuacacuguuggu

SEQ ID NO: 820914 - RNA, 20 nt, Artificial Sequence
  Synthetic
aacucuuuuacacuguuggu

SEQ ID NO: 820915 - RNA, 20 nt, Artificial Sequence
  Synthetic
aacccuuaugcacuguuggu

SEQ ID NO: 820916 - RNA, 20 nt, Artificial Sequence
  Synthetic
aaugcuuauacccuguuggu

SEQ ID NO: 820917 - RNA, 20 nt, Artificial Sequence
  Synthetic
aacacuucugcauuguuggu

SEQ ID NO: 820918 - RNA, 20 nt, Artificial Sequence
  Synthetic
aagaagucaccaaauuuggu

SEQ ID NO: 820919 - RNA, 20 nt, Artificial Sequence
  Synthetic
auggcuuuaggaaauuuggu

SEQ ID NO: 820920 - RNA, 20 nt, Artificial Sequence
  Synthetic
cucauguugcuaaauuuggu

SEQ ID NO: 820921 - RNA, 20 nt, Artificial Sequence
  Synthetic
uacuucaguuuuaauuuggu

SEQ ID NO: 820922 - RNA, 20 nt, Artificial Sequence
  Synthetic
uuaaaaugaggucauuuggu

SEQ ID NO: 820923 - RNA, 20 nt, Artificial Sequence
  Synthetic
uugguugaaagcuauuuggu

SEQ ID NO: 820924 - RNA, 20 nt, Artificial Sequence
  Synthetic
uaguguuuucucuauuuggu

SEQ ID NO: 820925 - RNA, 20 nt, Artificial Sequence
  Synthetic
uuaauggaaauguauuuggu

SEQ ID NO: 820926 - RNA, 20 nt, Artificial Sequence
  Synthetic
ugguuaacauuaacuuuggu

SEQ ID NO: 820927 - RNA, 20 nt, Artificial Sequence
  Synthetic
cugauugguuaaucuuuggu

SEQ ID NO: 820928 - RNA, 20 nt, Artificial Sequence
  Synthetic
ucauggagcugcaguuuggu

SEQ ID NO: 820929 - RNA, 20 nt, Artificial Sequence
  Synthetic
uaacuggaaugcuguuuggu

SEQ ID NO: 820930 - RNA, 20 nt, Artificial Sequence
  Synthetic
ucuuuugucuuuuguuuggu

SEQ ID NO: 820931 - RNA, 20 nt, Artificial Sequence
  Synthetic
agcaucuucucuauuuuggu

SEQ ID NO: 820932 - RNA, 20 nt, Artificial Sequence
  Synthetic
ugacaaagauuccuuuuggu

SEQ ID NO: 820933 - RNA, 20 nt, Artificial Sequence
  Synthetic
uucaccagcuugguuuuggu

SEQ ID NO: 820934 - RNA, 20 nt, Artificial Sequence
  Synthetic
ugggggaggugauuuuuggu

SEQ ID NO: 820935 - RNA, 20 nt, Artificial Sequence
  Synthetic
auauuuggaauguuuuuggu

SEQ ID NO: 820936 - RNA, 20 nt, Artificial Sequence
  Synthetic
cuuauguagcauuuuuuggu

SEQ ID NO: 820937 - RNA, 20 nt, Artificial Sequence
  Synthetic
cccauggcaaaaaaaaaugu

SEQ ID NO: 820938 - RNA, 20 nt, Artificial Sequence
  Synthetic
cuuaacaaagacaaaaaugu

SEQ ID NO: 820939 - RNA, 20 nt, Artificial Sequence
  Synthetic
agccugggggccaaaaaugu

SEQ ID NO: 820940 - RNA, 20 nt, Artificial Sequence
  Synthetic
ucagcuaagaagaaaaaugu

SEQ ID NO: 820941 - RNA, 20 nt, Artificial Sequence
  Synthetic
aaaacuuuuuuuaaaaaugu

SEQ ID NO: 820942 - RNA, 20 nt, Artificial Sequence
  Synthetic
uaaaaggagacccaaaaugu

SEQ ID NO: 820943 - RNA, 20 nt, Artificial Sequence
  Synthetic
aaauggaaaagucaaaaugu

SEQ ID NO: 820944 - RNA, 20 nt, Artificial Sequence
  Synthetic
acaaacaacgaagaaaaugu

SEQ ID NO: 820945 - RNA, 20 nt, Artificial Sequence
  Synthetic
aaacucuucuaagaaaaugu

SEQ ID NO: 820946 - RNA, 20 nt, Artificial Sequence
  Synthetic
cucagaagaaaggaaaaugu

SEQ ID NO: 820947 - RNA, 20 nt, Artificial Sequence
  Synthetic
acagugcagaaggaaaaugu

SEQ ID NO: 820948 - RNA, 20 nt, Artificial Sequence
  Synthetic
agaagaugacaggaaaaugu

SEQ ID NO: 820949 - RNA, 20 nt, Artificial Sequence
  Synthetic
uuuuaggacuuugaaaaugu

SEQ ID NO: 820950 - RNA, 20 nt, Artificial Sequence
  Synthetic
cccagauggcaauaaaaugu

SEQ ID NO: 820951 - RNA, 20 nt, Artificial Sequence
  Synthetic
auguuagaaacauaaaaugu

SEQ ID NO: 820952 - RNA, 20 nt, Artificial Sequence
  Synthetic
caaaguaaguuauaaaaugu

SEQ ID NO: 820953 - RNA, 20 nt, Artificial Sequence
  Synthetic
uguccucauuuguaaaaugu

SEQ ID NO: 820954 - RNA, 20 nt, Artificial Sequence
  Synthetic
uagaguagaggcccaaaugu

SEQ ID NO: 820955 - RNA, 20 nt, Artificial Sequence
  Synthetic
caacaauacuuuccaaaugu

SEQ ID NO: 820956 - RNA, 20 nt, Artificial Sequence
  Synthetic
ugaauacugaaagcaaaugu

SEQ ID NO: 820957 - RNA, 20 nt, Artificial Sequence
  Synthetic
aagagcucacaaucaaaugu

SEQ ID NO: 820958 - RNA, 20 nt, Artificial Sequence
  Synthetic
cagguacaccaaucaaaugu

SEQ ID NO: 820959 - RNA, 20 nt, Artificial Sequence
  Synthetic
cuacauacaguaagaaaugu

SEQ ID NO: 820960 - RNA, 20 nt, Artificial Sequence
  Synthetic
ucagugcagaagagaaaugu

SEQ ID NO: 820961 - RNA, 20 nt, Artificial Sequence
  Synthetic
auaaaaauauuuagaaaugu

SEQ ID NO: 820962 - RNA, 20 nt, Artificial Sequence
  Synthetic
acaguguggaagggaaaugu

SEQ ID NO: 820963 - RNA, 20 nt, Artificial Sequence
  Synthetic
uuaagaugaaugggaaaugu

SEQ ID NO: 820964 - RNA, 20 nt, Artificial Sequence
  Synthetic
cuagacaggcucugaaaugu

SEQ ID NO: 820965 - RNA, 20 nt, Artificial Sequence
  Synthetic
aaaaauaauaaaauaaaugu

SEQ ID NO: 820966 - RNA, 20 nt, Artificial Sequence
  Synthetic
ugaucacugcagauaaaugu

SEQ ID NO: 820967 - RNA, 20 nt, Artificial Sequence
  Synthetic
augaggguguuacuaaaugu

SEQ ID NO: 820968 - RNA, 20 nt, Artificial Sequence
  Synthetic
uaaugccuuugucuaaaugu

SEQ ID NO: 820969 - RNA, 20 nt, Artificial Sequence
  Synthetic
aaugauaaguuaguaaaugu

SEQ ID NO: 820970 - RNA, 20 nt, Artificial Sequence
  Synthetic
uuccuaggagcauuaaaugu

SEQ ID NO: 820971 - RNA, 20 nt, Artificial Sequence
  Synthetic
cuuaaaacuggaaacaaugu

SEQ ID NO: 820972 - RNA, 20 nt, Artificial Sequence
  Synthetic
cagauuacccuccacaaugu

SEQ ID NO: 820973 - RNA, 20 nt, Artificial Sequence
  Synthetic
uaucuuccauuccacaaugu

SEQ ID NO: 820974 - RNA, 20 nt, Artificial Sequence
  Synthetic
uuagcuuguaaagacaaugu

SEQ ID NO: 820975 - RNA, 20 nt, Artificial Sequence
  Synthetic
ucaauuugggaauacaaugu

SEQ ID NO: 820976 - RNA, 20 nt, Artificial Sequence
  Synthetic
ugcccugucuaauacaaugu

SEQ ID NO: 820977 - RNA, 20 nt, Artificial Sequence
  Synthetic
cagugucuucuuaccaaugu

SEQ ID NO: 820978 - RNA, 20 nt, Artificial Sequence
  Synthetic
uaaauuguaauccccaaugu

SEQ ID NO: 820979 - RNA, 20 nt, Artificial Sequence
  Synthetic
auauuuagguacuccaaugu

SEQ ID NO: 820980 - RNA, 20 nt, Artificial Sequence
  Synthetic
ugaaaugugauuuccaaugu

SEQ ID NO: 820981 - RNA, 20 nt, Artificial Sequence
  Synthetic
uauucauuucugagcaaugu

SEQ ID NO: 820982 - RNA, 20 nt, Artificial Sequence
  Synthetic
cuucuugucagaggcaaugu

SEQ ID NO: 820983 - RNA, 20 nt, Artificial Sequence
  Synthetic
caggauugucuuggcaaugu

SEQ ID NO: 820984 - RNA, 20 nt, Artificial Sequence
  Synthetic
uuaaaaagagaaaucaaugu

SEQ ID NO: 820985 - RNA, 20 nt, Artificial Sequence
  Synthetic
cagagaucugccuucaaugu

SEQ ID NO: 820986 - RNA, 20 nt, Artificial Sequence
  Synthetic
ccuugacagauuuucaaugu

SEQ ID NO: 820987 - RNA, 20 nt, Artificial Sequence
  Synthetic
aaccagggcuuaaagaaugu

SEQ ID NO: 820988 - RNA, 20 nt, Artificial Sequence
  Synthetic
uaaaaaaaugauaagaaugu

SEQ ID NO: 820989 - RNA, 20 nt, Artificial Sequence
  Synthetic
ugcucugaugcccagaaugu

SEQ ID NO: 820990 - RNA, 20 nt, Artificial Sequence
  Synthetic
uuauuugaaacucagaaugu

SEQ ID NO: 820991 - RNA, 20 nt, Artificial Sequence
  Synthetic
ugauaguuugcucagaaugu

SEQ ID NO: 820992 - RNA, 20 nt, Artificial Sequence
  Synthetic
uuuuuucugcacuagaaugu

SEQ ID NO: 820993 - RNA, 20 nt, Artificial Sequence
  Synthetic
auugacucuagguagaaugu

SEQ ID NO: 820994 - RNA, 20 nt, Artificial Sequence
  Synthetic
agccauaguccuuagaaugu

SEQ ID NO: 820995 - RNA, 20 nt, Artificial Sequence
  Synthetic
caaaggggugguuagaaugu

SEQ ID NO: 820996 - RNA, 20 nt, Artificial Sequence
  Synthetic
uagcuuuguugaaugaaugu

SEQ ID NO: 820997 - RNA, 20 nt, Artificial Sequence
  Synthetic
aggagaaggguaaugaaugu

SEQ ID NO: 820998 - RNA, 20 nt, Artificial Sequence
  Synthetic
uauaaccaacaucugaaugu

SEQ ID NO: 820999 - RNA, 20 nt, Artificial Sequence
  Synthetic
acuuugucguacuugaaugu

SEQ ID NO: 821000 - RNA, 20 nt, Artificial Sequence
  Synthetic
uauuuccugaauuugaaugu

SEQ ID NO: 821001 - RNA, 20 nt, Artificial Sequence
  Synthetic
aacaucuauuauuugaaugu

SEQ ID NO: 821002 - RNA, 20 nt, Artificial Sequence
  Synthetic
uauuggaaaccuuugaaugu

SEQ ID NO: 821003 - RNA, 20 nt, Artificial Sequence
  Synthetic
augauuaagaaaaauaaugu

SEQ ID NO: 821004 - RNA, 20 nt, Artificial Sequence
  Synthetic
cuggugaaaaacaauaaugu

SEQ ID NO: 821005 - RNA, 20 nt, Artificial Sequence
  Synthetic
acaggcagcaggaauaaugu

SEQ ID NO: 821006 - RNA, 20 nt, Artificial Sequence
  Synthetic
cagagggaggugaauaaugu

SEQ ID NO: 821007 - RNA, 20 nt, Artificial Sequence
  Synthetic
agauaugagaacuauaaugu

SEQ ID NO: 821008 - RNA, 20 nt, Artificial Sequence
  Synthetic
acaguuuuuuguuauaaugu

SEQ ID NO: 821009 - RNA, 20 nt, Artificial Sequence
  Synthetic
acuguaggcagaacuaaugu

SEQ ID NO: 821010 - RNA, 20 nt, Artificial Sequence
  Synthetic
cuuuaaaugcugucuaaugu

SEQ ID NO: 821011 - RNA, 20 nt, Artificial Sequence
  Synthetic
aaaucagugguauguaaugu

SEQ ID NO: 821012 - RNA, 20 nt, Artificial Sequence
  Synthetic
ucuuuuuauuucuguaaugu

SEQ ID NO: 821013 - RNA, 20 nt, Artificial Sequence
  Synthetic
uuauuaagaccuuguaaugu

SEQ ID NO: 821014 - RNA, 20 nt, Artificial Sequence
  Synthetic
uuggacuuuuggguuaaugu

SEQ ID NO: 821015 - RNA, 20 nt, Artificial Sequence
  Synthetic
ugaagugcaauauuuaaugu

SEQ ID NO: 821016 - RNA, 20 nt, Artificial Sequence
  Synthetic
uaauuacuaaaacaacaugu

SEQ ID NO: 821017 - RNA, 20 nt, Artificial Sequence
  Synthetic
agguccuucccacaacaugu

SEQ ID NO: 821018 - RNA, 20 nt, Artificial Sequence
  Synthetic
ugggaaaaacuugaacaugu

SEQ ID NO: 821019 - RNA, 20 nt, Artificial Sequence
  Synthetic
cguguuuccuguacacaugu

SEQ ID NO: 821020 - RNA, 20 nt, Artificial Sequence
  Synthetic
aaauuacagaguccacaugu

SEQ ID NO: 821021 - RNA, 20 nt, Artificial Sequence
  Synthetic
auccacaucuaagcacaugu

SEQ ID NO: 821022 - RNA, 20 nt, Artificial Sequence
  Synthetic
ugcauuauuacaucacaugu

SEQ ID NO: 821023 - RNA, 20 nt, Artificial Sequence
  Synthetic
auguguugucacucacaugu

SEQ ID NO: 821024 - RNA, 20 nt, Artificial Sequence
  Synthetic
ccucacauuaauucacaugu

SEQ ID NO: 821025 - RNA, 20 nt, Artificial Sequence
  Synthetic
agagacaggguuucacaugu

SEQ ID NO: 821026 - RNA, 20 nt, Artificial Sequence
  Synthetic
uagaguugaugaagacaugu

SEQ ID NO: 821027 - RNA, 20 nt, Artificial Sequence
  Synthetic
accagguaugguagacaugu

SEQ ID NO: 821028 - RNA, 20 nt, Artificial Sequence
  Synthetic
uggcuccacccuugacaugu

SEQ ID NO: 821029 - RNA, 20 nt, Artificial Sequence
  Synthetic
agugauggucugauacaugu

SEQ ID NO: 821030 - RNA, 20 nt, Artificial Sequence
  Synthetic
ugcacagucuguauacaugu

SEQ ID NO: 821031 - RNA, 20 nt, Artificial Sequence
  Synthetic
aaaugcaaggugcuacaugu

SEQ ID NO: 821032 - RNA, 20 nt, Artificial Sequence
  Synthetic
caagccucugaaguacaugu

SEQ ID NO: 821033 - RNA, 20 nt, Artificial Sequence
  Synthetic
caaucugguuuuguacaugu

SEQ ID NO: 821034 - RNA, 20 nt, Artificial Sequence
  Synthetic
uauuuacauauauuacaugu

SEQ ID NO: 821035 - RNA, 20 nt, Artificial Sequence
  Synthetic
cuuagucagauacaccaugu

SEQ ID NO: 821036 - RNA, 20 nt, Artificial Sequence
  Synthetic
aagacggggucucaccaugu

SEQ ID NO: 821037 - RNA, 20 nt, Artificial Sequence
  Synthetic
agagacgggauucaccaugu

SEQ ID NO: 821038 - RNA, 20 nt, Artificial Sequence
  Synthetic
uucaaaaugcuucaccaugu

SEQ ID NO: 821039 - RNA, 20 nt, Artificial Sequence
  Synthetic
uauuuuguauuucaccaugu

SEQ ID NO: 821040 - RNA, 20 nt, Artificial Sequence
  Synthetic
uguugugggagggaccaugu

SEQ ID NO: 821041 - RNA, 20 nt, Artificial Sequence
  Synthetic
uccucucuuuucuaccaugu

SEQ ID NO: 821042 - RNA, 20 nt, Artificial Sequence
  Synthetic
uugaugauccugacccaugu

SEQ ID NO: 821043 - RNA, 20 nt, Artificial Sequence
  Synthetic
uuucacauacauacccaugu

SEQ ID NO: 821044 - RNA, 20 nt, Artificial Sequence
  Synthetic
agaaaucacaacagccaugu

SEQ ID NO: 821045 - RNA, 20 nt, Artificial Sequence
  Synthetic
auuuauuuuuauagccaugu

SEQ ID NO: 821046 - RNA, 20 nt, Artificial Sequence
  Synthetic
agauggaggguucgccaugu

SEQ ID NO: 821047 - RNA, 20 nt, Artificial Sequence
  Synthetic
uauauauacaugugccaugu

SEQ ID NO: 821048 - RNA, 20 nt, Artificial Sequence
  Synthetic
cacguauacaugugccaugu

SEQ ID NO: 821049 - RNA, 20 nt, Artificial Sequence
  Synthetic
uauguauacaugugccaugu

SEQ ID NO: 821050 - RNA, 20 nt, Artificial Sequence
  Synthetic
uauguauaccugugccaugu

SEQ ID NO: 821051 - RNA, 20 nt, Artificial Sequence
  Synthetic
cagacgggguuuugccaugu

SEQ ID NO: 821052 - RNA, 20 nt, Artificial Sequence
  Synthetic
uccuccagguccauccaugu

SEQ ID NO: 821053 - RNA, 20 nt, Artificial Sequence
  Synthetic
uuugcucucguuguccaugu

SEQ ID NO: 821054 - RNA, 20 nt, Artificial Sequence
  Synthetic
caaaaguaaaauuuccaugu

SEQ ID NO: 821055 - RNA, 20 nt, Artificial Sequence
  Synthetic
cuucauacuguuuuccaugu

SEQ ID NO: 821056 - RNA, 20 nt, Artificial Sequence
  Synthetic
uauuggaauacuaagcaugu

SEQ ID NO: 821057 - RNA, 20 nt, Artificial Sequence
  Synthetic
caugccauggcugagcaugu

SEQ ID NO: 821058 - RNA, 20 nt, Artificial Sequence
  Synthetic
cgauguggggccaggcaugu

SEQ ID NO: 821059 - RNA, 20 nt, Artificial Sequence
  Synthetic
aaaaauauuuuggggcaugu

SEQ ID NO: 821060 - RNA, 20 nt, Artificial Sequence
  Synthetic
accauguuucgcuggcaugu

SEQ ID NO: 821061 - RNA, 20 nt, Artificial Sequence
  Synthetic
uuuucucugaacaugcaugu

SEQ ID NO: 821062 - RNA, 20 nt, Artificial Sequence
  Synthetic
ucuauagaauuuuugcaugu

SEQ ID NO: 821063 - RNA, 20 nt, Artificial Sequence
  Synthetic
auuuacuuugagaaucaugu

SEQ ID NO: 821064 - RNA, 20 nt, Artificial Sequence
  Synthetic
uaggugugauuggaucaugu

SEQ ID NO: 821065 - RNA, 20 nt, Artificial Sequence
  Synthetic
ugacagcaauuuccucaugu

SEQ ID NO: 821066 - RNA, 20 nt, Artificial Sequence
  Synthetic
cuuugucuuuccucucaugu

SEQ ID NO: 821067 - RNA, 20 nt, Artificial Sequence
  Synthetic
acaaaaagaaagucucaugu

SEQ ID NO: 821068 - RNA, 20 nt, Artificial Sequence
  Synthetic
uucuuuguaucaagucaugu

SEQ ID NO: 821069 - RNA, 20 nt, Artificial Sequence
  Synthetic
ucauguuuaaugagucaugu

SEQ ID NO: 821070 - RNA, 20 nt, Artificial Sequence
  Synthetic
agggucucacucugucaugu

SEQ ID NO: 821071 - RNA, 20 nt, Artificial Sequence
  Synthetic
cauuuucugcaacuucaugu

SEQ ID NO: 821072 - RNA, 20 nt, Artificial Sequence
  Synthetic
aaagggcaacauuuucaugu

SEQ ID NO: 821073 - RNA, 20 nt, Artificial Sequence
  Synthetic
cauuucccagguuuucaugu

SEQ ID NO: 821074 - RNA, 20 nt, Artificial Sequence
  Synthetic
agaauaauuauuuuucaugu

SEQ ID NO: 821075 - RNA, 20 nt, Artificial Sequence
  Synthetic
uauacuuauaugaaagaugu

SEQ ID NO: 821076 - RNA, 20 nt, Artificial Sequence
  Synthetic
ugauuuacaagacaagaugu

SEQ ID NO: 821077 - RNA, 20 nt, Artificial Sequence
  Synthetic
uuaucccuaaaagaagaugu

SEQ ID NO: 821078 - RNA, 20 nt, Artificial Sequence
  Synthetic
agagagaggagggaagaugu

SEQ ID NO: 821079 - RNA, 20 nt, Artificial Sequence
  Synthetic
ugcuuuccuuuugaagaugu

SEQ ID NO: 821080 - RNA, 20 nt, Artificial Sequence
  Synthetic
ugaaggcaguuuuaagaugu

SEQ ID NO: 821081 - RNA, 20 nt, Artificial Sequence
  Synthetic
accaguaucaucacagaugu

SEQ ID NO: 821082 - RNA, 20 nt, Artificial Sequence
  Synthetic
uagcauuuaaaaccagaugu

SEQ ID NO: 821083 - RNA, 20 nt, Artificial Sequence
  Synthetic
ugcacagccagcccagaugu

SEQ ID NO: 821084 - RNA, 20 nt, Artificial Sequence
  Synthetic
aucgacaucuuagcagaugu

SEQ ID NO: 821085 - RNA, 20 nt, Artificial Sequence
  Synthetic
aaaaguaaguuugcagaugu

SEQ ID NO: 821086 - RNA, 20 nt, Artificial Sequence
  Synthetic
ugaaacaauucaucagaugu

SEQ ID NO: 821087 - RNA, 20 nt, Artificial Sequence
  Synthetic
aggaagggagagagagaugu

SEQ ID NO: 821088 - RNA, 20 nt, Artificial Sequence
  Synthetic
aaaucaaacucaggagaugu

SEQ ID NO: 821089 - RNA, 20 nt, Artificial Sequence
  Synthetic
aaauuaaacucaggagaugu

SEQ ID NO: 821090 - RNA, 20 nt, Artificial Sequence
  Synthetic
uuaauaacaucuggagaugu

SEQ ID NO: 821091 - RNA, 20 nt, Artificial Sequence
  Synthetic
ugaacaaagucuugagaugu

SEQ ID NO: 821092 - RNA, 20 nt, Artificial Sequence
  Synthetic
uuugugcaguaaauagaugu

SEQ ID NO: 821093 - RNA, 20 nt, Artificial Sequence
  Synthetic
acucaaaacacaauagaugu

SEQ ID NO: 821094 - RNA, 20 nt, Artificial Sequence
  Synthetic
ugaauuauugaauuagaugu

SEQ ID NO: 821095 - RNA, 20 nt, Artificial Sequence
  Synthetic
uggggucuuuauuuagaugu

SEQ ID NO: 821096 - RNA, 20 nt, Artificial Sequence
  Synthetic
caggauugacuuggcgaugu

SEQ ID NO: 821097 - RNA, 20 nt, Artificial Sequence
  Synthetic
ccagaaacugaauucgaugu

SEQ ID NO: 821098 - RNA, 20 nt, Artificial Sequence
  Synthetic
aggguagaauauaaggaugu

SEQ ID NO: 821099 - RNA, 20 nt, Artificial Sequence
  Synthetic
ucuaaaagaccugaggaugu

SEQ ID NO: 821100 - RNA, 20 nt, Artificial Sequence
  Synthetic
cccagguuuugugaggaugu

SEQ ID NO: 821101 - RNA, 20 nt, Artificial Sequence
  Synthetic
aggaagcugugguaggaugu

SEQ ID NO: 821102 - RNA, 20 nt, Artificial Sequence
  Synthetic
aacuggaagcagugggaugu

SEQ ID NO: 821103 - RNA, 20 nt, Artificial Sequence
  Synthetic
cccacaaccucgugggaugu

SEQ ID NO: 821104 - RNA, 20 nt, Artificial Sequence
  Synthetic
uaguagcagaagauggaugu

SEQ ID NO: 821105 - RNA, 20 nt, Artificial Sequence
  Synthetic
uuuugagcuauuauggaugu

SEQ ID NO: 821106 - RNA, 20 nt, Artificial Sequence
  Synthetic
ucaagucaugcacuggaugu

SEQ ID NO: 821107 - RNA, 20 nt, Artificial Sequence
  Synthetic
uuuaggagugaaguggaugu

SEQ ID NO: 821108 - RNA, 20 nt, Artificial Sequence
  Synthetic
uguuaauuauguuuggaugu

SEQ ID NO: 821109 - RNA, 20 nt, Artificial Sequence
  Synthetic
cuaccaauuaucaaugaugu

SEQ ID NO: 821110 - RNA, 20 nt, Artificial Sequence
  Synthetic
agucagccauguaaugaugu

SEQ ID NO: 821111 - RNA, 20 nt, Artificial Sequence
  Synthetic
acugccuuaagccaugaugu

SEQ ID NO: 821112 - RNA, 20 nt, Artificial Sequence
  Synthetic
agaugaaauagagaugaugu

SEQ ID NO: 821113 - RNA, 20 nt, Artificial Sequence
  Synthetic
cuucacuauguauaugaugu

SEQ ID NO: 821114 - RNA, 20 nt, Artificial Sequence
  Synthetic
ugauccuguaauuaugaugu

SEQ ID NO: 821115 - RNA, 20 nt, Artificial Sequence
  Synthetic
aaaaauauuaacccugaugu

SEQ ID NO: 821116 - RNA, 20 nt, Artificial Sequence
  Synthetic
ugcagcucaccuccugaugu

SEQ ID NO: 821117 - RNA, 20 nt, Artificial Sequence
  Synthetic
aaacaaaugguugcugaugu

SEQ ID NO: 821118 - RNA, 20 nt, Artificial Sequence
  Synthetic
auaacuaauacuucugaugu

SEQ ID NO: 821119 - RNA, 20 nt, Artificial Sequence
  Synthetic
uguuggaaccaaagugaugu

SEQ ID NO: 821120 - RNA, 20 nt, Artificial Sequence
  Synthetic
acacauucugacugugaugu

SEQ ID NO: 821121 - RNA, 20 nt, Artificial Sequence
  Synthetic
uuagugaaaaccugugaugu

SEQ ID NO: 821122 - RNA, 20 nt, Artificial Sequence
  Synthetic
aggggccagcucugugaugu

SEQ ID NO: 821123 - RNA, 20 nt, Artificial Sequence
  Synthetic
cacacagguaugugugaugu

SEQ ID NO: 821124 - RNA, 20 nt, Artificial Sequence
  Synthetic
aaaauuuauccuugugaugu

SEQ ID NO: 821125 - RNA, 20 nt, Artificial Sequence
  Synthetic
ugaugcuaccuuugugaugu

SEQ ID NO: 821126 - RNA, 20 nt, Artificial Sequence
  Synthetic
cuuuuguauuuuugugaugu

SEQ ID NO: 821127 - RNA, 20 nt, Artificial Sequence
  Synthetic
cagcaaaucccccuugaugu

SEQ ID NO: 821128 - RNA, 20 nt, Artificial Sequence
  Synthetic
aaauguuaagauguugaugu

SEQ ID NO: 821129 - RNA, 20 nt, Artificial Sequence
  Synthetic
acuuucaggcucuuugaugu

SEQ ID NO: 821130 - RNA, 20 nt, Artificial Sequence
  Synthetic
cuaccuuuggucuuugaugu

SEQ ID NO: 821131 - RNA, 20 nt, Artificial Sequence
  Synthetic
uauuucuucuuuuuugaugu

SEQ ID NO: 821132 - RNA, 20 nt, Artificial Sequence
  Synthetic
cugcuucugaaaaaauaugu

SEQ ID NO: 821133 - RNA, 20 nt, Artificial Sequence
  Synthetic
uaaucaaagaugaaauaugu

SEQ ID NO: 821134 - RNA, 20 nt, Artificial Sequence
  Synthetic
agccugucagauaaauaugu

SEQ ID NO: 821135 - RNA, 20 nt, Artificial Sequence
  Synthetic
auguggggcuuuaaauaugu

SEQ ID NO: 821136 - RNA, 20 nt, Artificial Sequence
  Synthetic
uauuugauucugcaauaugu

SEQ ID NO: 821137 - RNA, 20 nt, Artificial Sequence
  Synthetic
augacuaguugucaauaugu

SEQ ID NO: 821138 - RNA, 20 nt, Artificial Sequence
  Synthetic
ugcuaucuuacagaauaugu

SEQ ID NO: 821139 - RNA, 20 nt, Artificial Sequence
  Synthetic
auauagaaaacugaauaugu

SEQ ID NO: 821140 - RNA, 20 nt, Artificial Sequence
  Synthetic
aaagaugaaagugaauaugu

SEQ ID NO: 821141 - RNA, 20 nt, Artificial Sequence
  Synthetic
auauugaaauaauaauaugu

SEQ ID NO: 821142 - RNA, 20 nt, Artificial Sequence
  Synthetic
aggaauuuucuauaauaugu

SEQ ID NO: 821143 - RNA, 20 nt, Artificial Sequence
  Synthetic
agggaaguaugaacauaugu

SEQ ID NO: 821144 - RNA, 20 nt, Artificial Sequence
  Synthetic
caaagauuguagacauaugu

SEQ ID NO: 821145 - RNA, 20 nt, Artificial Sequence
  Synthetic
aaaauaauuuauccauaugu

SEQ ID NO: 821146 - RNA, 20 nt, Artificial Sequence
  Synthetic
auauguaucauagcauaugu

SEQ ID NO: 821147 - RNA, 20 nt, Artificial Sequence
  Synthetic
uuccuuguuuucucauaugu

SEQ ID NO: 821148 - RNA, 20 nt, Artificial Sequence
  Synthetic
aaccucguuaauucauaugu

SEQ ID NO: 821149 - RNA, 20 nt, Artificial Sequence
  Synthetic
aagcagccaagaagauaugu

SEQ ID NO: 821150 - RNA, 20 nt, Artificial Sequence
  Synthetic
uucuacuuagucagauaugu

SEQ ID NO: 821151 - RNA, 20 nt, Artificial Sequence
  Synthetic
cagaauuuuaauagauaugu

SEQ ID NO: 821152 - RNA, 20 nt, Artificial Sequence
  Synthetic
ucuggaucaaucugauaugu

SEQ ID NO: 821153 - RNA, 20 nt, Artificial Sequence
  Synthetic
uacuauaacuauugauaugu

SEQ ID NO: 821154 - RNA, 20 nt, Artificial Sequence
  Synthetic
uuaucugacacaauauaugu

SEQ ID NO: 821155 - RNA, 20 nt, Artificial Sequence
  Synthetic
acacacacacacauauaugu

SEQ ID NO: 821156 - RNA, 20 nt, Artificial Sequence
  Synthetic
ugggguacauauauauaugu

SEQ ID NO: 821157 - RNA, 20 nt, Artificial Sequence
  Synthetic
ugugggguauauauauaugu

SEQ ID NO: 821158 - RNA, 20 nt, Artificial Sequence
  Synthetic
cauacauaguguauauaugu

SEQ ID NO: 821159 - RNA, 20 nt, Artificial Sequence
  Synthetic
auauauauguguauauaugu

SEQ ID NO: 821160 - RNA, 20 nt, Artificial Sequence
  Synthetic
aacaucuuguggcuauaugu

SEQ ID NO: 821161 - RNA, 20 nt, Artificial Sequence
  Synthetic
cuuaaucauauuguauaugu

SEQ ID NO: 821162 - RNA, 20 nt, Artificial Sequence
  Synthetic
uuuggaugucuauuauaugu

SEQ ID NO: 821163 - RNA, 20 nt, Artificial Sequence
  Synthetic
ucuuuguauauguuauaugu

SEQ ID NO: 821164 - RNA, 20 nt, Artificial Sequence
  Synthetic
uuucuagaaaacaacuaugu

SEQ ID NO: 821165 - RNA, 20 nt, Artificial Sequence
  Synthetic
aaauaguuugagaacuaugu

SEQ ID NO: 821166 - RNA, 20 nt, Artificial Sequence
  Synthetic
ucaaugaaucuacacuaugu

SEQ ID NO: 821167 - RNA, 20 nt, Artificial Sequence
  Synthetic
auuauuguugugaccuaugu

SEQ ID NO: 821168 - RNA, 20 nt, Artificial Sequence
  Synthetic
aaacaagucuguaccuaugu

SEQ ID NO: 821169 - RNA, 20 nt, Artificial Sequence
  Synthetic
cuaaacuuaugggccuaugu

SEQ ID NO: 821170 - RNA, 20 nt, Artificial Sequence
  Synthetic
uaggauugacuuggcuaugu

SEQ ID NO: 821171 - RNA, 20 nt, Artificial Sequence
  Synthetic
uagucuguccuuugcuaugu

SEQ ID NO: 821172 - RNA, 20 nt, Artificial Sequence
  Synthetic
aaccaugagguuugcuaugu

SEQ ID NO: 821173 - RNA, 20 nt, Artificial Sequence
  Synthetic
uuggcucagagaaucuaugu

SEQ ID NO: 821174 - RNA, 20 nt, Artificial Sequence
  Synthetic
ccccaguggggacucuaugu

SEQ ID NO: 821175 - RNA, 20 nt, Artificial Sequence
  Synthetic
acucuuacaugccucuaugu

SEQ ID NO: 821176 - RNA, 20 nt, Artificial Sequence
  Synthetic
uaggggggcacugucuaugu

SEQ ID NO: 821177 - RNA, 20 nt, Artificial Sequence
  Synthetic
uguccuggccgagaguaugu

SEQ ID NO: 821178 - RNA, 20 nt, Artificial Sequence
  Synthetic
auuuuauuaugugaguaugu

SEQ ID NO: 821179 - RNA, 20 nt, Artificial Sequence
  Synthetic
ugagggagacuugaguaugu

SEQ ID NO: 821180 - RNA, 20 nt, Artificial Sequence
  Synthetic
cuugcuguauccucguaugu

SEQ ID NO: 821181 - RNA, 20 nt, Artificial Sequence
  Synthetic
ccacauuucuuacuguaugu

SEQ ID NO: 821182 - RNA, 20 nt, Artificial Sequence
  Synthetic
aggaacacacguguguaugu

SEQ ID NO: 821183 - RNA, 20 nt, Artificial Sequence
  Synthetic
ucauuuacgcaguuguaugu

SEQ ID NO: 821184 - RNA, 20 nt, Artificial Sequence
  Synthetic
aaugaacuagcuuuguaugu

SEQ ID NO: 821185 - RNA, 20 nt, Artificial Sequence
  Synthetic
auuaauauaugaaauuaugu

SEQ ID NO: 821186 - RNA, 20 nt, Artificial Sequence
  Synthetic
acagauuggaugaauuaugu

SEQ ID NO: 821187 - RNA, 20 nt, Artificial Sequence
  Synthetic
ccucuuacuugacauuaugu

SEQ ID NO: 821188 - RNA, 20 nt, Artificial Sequence
  Synthetic
aaaauuuucucccauuaugu

SEQ ID NO: 821189 - RNA, 20 nt, Artificial Sequence
  Synthetic
cagaacucagaucauuaugu

SEQ ID NO: 821190 - RNA, 20 nt, Artificial Sequence
  Synthetic
aaauguuuaagagauuaugu

SEQ ID NO: 821191 - RNA, 20 nt, Artificial Sequence
  Synthetic
acccaagacuuagauuaugu

SEQ ID NO: 821192 - RNA, 20 nt, Artificial Sequence
  Synthetic
agcaguucuuccuauuaugu

SEQ ID NO: 821193 - RNA, 20 nt, Artificial Sequence
  Synthetic
uuccuuuuuauguauuaugu

SEQ ID NO: 821194 - RNA, 20 nt, Artificial Sequence
  Synthetic
uggcaaaguuuguauuaugu

SEQ ID NO: 821195 - RNA, 20 nt, Artificial Sequence
  Synthetic
uaugucagaauuucuuaugu

SEQ ID NO: 821196 - RNA, 20 nt, Artificial Sequence
  Synthetic
aagauaaaugugaguuaugu

SEQ ID NO: 821197 - RNA, 20 nt, Artificial Sequence
  Synthetic
aaggaagguuuuaguuaugu

SEQ ID NO: 821198 - RNA, 20 nt, Artificial Sequence
  Synthetic
auauuuuguguaauuuaugu

SEQ ID NO: 821199 - RNA, 20 nt, Artificial Sequence
  Synthetic
accuaggcuggacuuuaugu

SEQ ID NO: 821200 - RNA, 20 nt, Artificial Sequence
  Synthetic
uguguauuucggcuuuaugu

SEQ ID NO: 821201 - RNA, 20 nt, Artificial Sequence
  Synthetic
ccauuuaaaacuguuuaugu

SEQ ID NO: 821202 - RNA, 20 nt, Artificial Sequence
  Synthetic
ucugcuuuuuguuuuuaugu

SEQ ID NO: 821203 - RNA, 20 nt, Artificial Sequence
  Synthetic
ugugcuucagacaaaacugu

SEQ ID NO: 821204 - RNA, 20 nt, Artificial Sequence
  Synthetic
aguagggccaagaaaacugu

SEQ ID NO: 821205 - RNA, 20 nt, Artificial Sequence
  Synthetic
auuuaggguugccaaacugu

SEQ ID NO: 821206 - RNA, 20 nt, Artificial Sequence
  Synthetic
cauaauaaaacagaaacugu

SEQ ID NO: 821207 - RNA, 20 nt, Artificial Sequence
  Synthetic
acaauaucagaggaaacugu

SEQ ID NO: 821208 - RNA, 20 nt, Artificial Sequence
  Synthetic
uuuuucuagauauaaacugu

SEQ ID NO: 821209 - RNA, 20 nt, Artificial Sequence
  Synthetic
aagcauugcuuauaaacugu

SEQ ID NO: 821210 - RNA, 20 nt, Artificial Sequence
  Synthetic
auuuuaaaguagacaacugu

SEQ ID NO: 821211 - RNA, 20 nt, Artificial Sequence
  Synthetic
agaugauuuugcccaacugu

SEQ ID NO: 821212 - RNA, 20 nt, Artificial Sequence
  Synthetic
acaugcagcucaagaacugu

SEQ ID NO: 821213 - RNA, 20 nt, Artificial Sequence
  Synthetic
uguugaaugaacagaacugu

SEQ ID NO: 821214 - RNA, 20 nt, Artificial Sequence
  Synthetic
uucuguaaucccagaacugu

SEQ ID NO: 821215 - RNA, 20 nt, Artificial Sequence
  Synthetic
uggguugagaguagaacugu

SEQ ID NO: 821216 - RNA, 20 nt, Artificial Sequence
  Synthetic
acucacuaacucauaacugu

SEQ ID NO: 821217 - RNA, 20 nt, Artificial Sequence
  Synthetic
acaucuuuucauauaacugu

SEQ ID NO: 821218 - RNA, 20 nt, Artificial Sequence
  Synthetic
caauacugaucacuaacugu

SEQ ID NO: 821219 - RNA, 20 nt, Artificial Sequence
  Synthetic
ugacggacaugacuaacugu

SEQ ID NO: 821220 - RNA, 20 nt, Artificial Sequence
  Synthetic
ccuagccuguauguaacugu

SEQ ID NO: 821221 - RNA, 20 nt, Artificial Sequence
  Synthetic
cagaugagaaaauuaacugu

SEQ ID NO: 821222 - RNA, 20 nt, Artificial Sequence
  Synthetic
uauagucucucuuuaacugu

SEQ ID NO: 821223 - RNA, 20 nt, Artificial Sequence
  Synthetic
augcuuacaugcaacacugu

SEQ ID NO: 821224 - RNA, 20 nt, Artificial Sequence
  Synthetic
aagcuaaguaguaacacugu

SEQ ID NO: 821225 - RNA, 20 nt, Artificial Sequence
  Synthetic
uaucaacagccacacacugu

SEQ ID NO: 821226 - RNA, 20 nt, Artificial Sequence
  Synthetic
auguucauagggcacacugu

SEQ ID NO: 821227 - RNA, 20 nt, Artificial Sequence
  Synthetic
aggaaaaccuugcacacugu

SEQ ID NO: 821228 - RNA, 20 nt, Artificial Sequence
  Synthetic
uaggaacacuucuacacugu

SEQ ID NO: 821229 - RNA, 20 nt, Artificial Sequence
  Synthetic
auacccagggaguacacugu

SEQ ID NO: 821230 - RNA, 20 nt, Artificial Sequence
  Synthetic
aggggacuccuguacacugu

SEQ ID NO: 821231 - RNA, 20 nt, Artificial Sequence
  Synthetic
uaggaacacucuuacacugu

SEQ ID NO: 821232 - RNA, 20 nt, Artificial Sequence
  Synthetic
caggaacacuuuuacacugu

SEQ ID NO: 821233 - RNA, 20 nt, Artificial Sequence
  Synthetic
uaggaacacuuuuacacugu

SEQ ID NO: 821234 - RNA, 20 nt, Artificial Sequence
  Synthetic
aaggaacgcuuuuacacugu

SEQ ID NO: 821235 - RNA, 20 nt, Artificial Sequence
  Synthetic
uaggaacgcuuuuacacugu

SEQ ID NO: 821236 - RNA, 20 nt, Artificial Sequence
  Synthetic
uaggugugcuuuuacacugu

SEQ ID NO: 821237 - RNA, 20 nt, Artificial Sequence
  Synthetic
uaggaacucuuuuacacugu

SEQ ID NO: 821238 - RNA, 20 nt, Artificial Sequence
  Synthetic
caaggauggcucaccacugu

SEQ ID NO: 821239 - RNA, 20 nt, Artificial Sequence
  Synthetic
ccucaugcuccucccacugu

SEQ ID NO: 821240 - RNA, 20 nt, Artificial Sequence
  Synthetic
uuaaauaauauguccacugu

SEQ ID NO: 821241 - RNA, 20 nt, Artificial Sequence
  Synthetic
ucucuccccccuuccacugu

SEQ ID NO: 821242 - RNA, 20 nt, Artificial Sequence
  Synthetic
auugacauucuaggcacugu

SEQ ID NO: 821243 - RNA, 20 nt, Artificial Sequence
  Synthetic
agggaacccuuaugcacugu

SEQ ID NO: 821244 - RNA, 20 nt, Artificial Sequence
  Synthetic
aauccuaugaugaucacugu

SEQ ID NO: 821245 - RNA, 20 nt, Artificial Sequence
  Synthetic
cuaaauuaaaauaucacugu

SEQ ID NO: 821246 - RNA, 20 nt, Artificial Sequence
  Synthetic
uuaauccagucuaucacugu

SEQ ID NO: 821247 - RNA, 20 nt, Artificial Sequence
  Synthetic
uuaaaugugauauucacugu

SEQ ID NO: 821248 - RNA, 20 nt, Artificial Sequence
  Synthetic
uaagauuggucuuucacugu

SEQ ID NO: 821249 - RNA, 20 nt, Artificial Sequence
  Synthetic
ccugauaaggccaagacugu

SEQ ID NO: 821250 - RNA, 20 nt, Artificial Sequence
  Synthetic
aacaguuuaaauaagacugu

SEQ ID NO: 821251 - RNA, 20 nt, Artificial Sequence
  Synthetic
ugaacuuuuguuaagacugu

SEQ ID NO: 821252 - RNA, 20 nt, Artificial Sequence
  Synthetic
cauccaagauaagagacugu

SEQ ID NO: 821253 - RNA, 20 nt, Artificial Sequence
  Synthetic
auaaccuaaagagagacugu

SEQ ID NO: 821254 - RNA, 20 nt, Artificial Sequence
  Synthetic
cauuaugccuucgagacugu

SEQ ID NO: 821255 - RNA, 20 nt, Artificial Sequence
  Synthetic
ugucagccuccagcgacugu

SEQ ID NO: 821256 - RNA, 20 nt, Artificial Sequence
  Synthetic
ucugucagcagcaggacugu

SEQ ID NO: 821257 - RNA, 20 nt, Artificial Sequence
  Synthetic
ucagcccaguucaggacugu

SEQ ID NO: 821258 - RNA, 20 nt, Artificial Sequence
  Synthetic
agaaagaacacaaugacugu

SEQ ID NO: 821259 - RNA, 20 nt, Artificial Sequence
  Synthetic
cugauucagaaucugacugu

SEQ ID NO: 821260 - RNA, 20 nt, Artificial Sequence
  Synthetic
uuaagacuuugagugacugu

SEQ ID NO: 821261 - RNA, 20 nt, Artificial Sequence
  Synthetic
uuaagacuuugggugacugu

SEQ ID NO: 821262 - RNA, 20 nt, Artificial Sequence
  Synthetic
cccuugguggcauugacugu

SEQ ID NO: 821263 - RNA, 20 nt, Artificial Sequence
  Synthetic
uaauuuugguaucauacugu

SEQ ID NO: 821264 - RNA, 20 nt, Artificial Sequence
  Synthetic
agccuggcuuuggauacugu

SEQ ID NO: 821265 - RNA, 20 nt, Artificial Sequence
  Synthetic
augcauagaauugauacugu

SEQ ID NO: 821266 - RNA, 20 nt, Artificial Sequence
  Synthetic
aaggaacccuuguauacugu

SEQ ID NO: 821267 - RNA, 20 nt, Artificial Sequence
  Synthetic
auuauuucuaaaacuacugu

SEQ ID NO: 821268 - RNA, 20 nt, Artificial Sequence
  Synthetic
aauguguauucugcuacugu

SEQ ID NO: 821269 - RNA, 20 nt, Artificial Sequence
  Synthetic
ccucucccaaaaucuacugu

SEQ ID NO: 821270 - RNA, 20 nt, Artificial Sequence
  Synthetic
auuuuugaaagaucuacugu

SEQ ID NO: 821271 - RNA, 20 nt, Artificial Sequence
  Synthetic
caauacaaaauacuuacugu

SEQ ID NO: 821272 - RNA, 20 nt, Artificial Sequence
  Synthetic
agugguagaaaucuuacugu

SEQ ID NO: 821273 - RNA, 20 nt, Artificial Sequence
  Synthetic
cuucagaaaccauuuacugu

SEQ ID NO: 821274 - RNA, 20 nt, Artificial Sequence
  Synthetic
caaaauuccuuuuuuacugu

SEQ ID NO: 821275 - RNA, 20 nt, Artificial Sequence
  Synthetic
auacuccugcugaaaccugu

SEQ ID NO: 821276 - RNA, 20 nt, Artificial Sequence
  Synthetic
uucccuuuacuccaaccugu

SEQ ID NO: 821277 - RNA, 20 nt, Artificial Sequence
  Synthetic
uaugcuuaacuucaaccugu

SEQ ID NO: 821278 - RNA, 20 nt, Artificial Sequence
  Synthetic
uuucuuuauccuugaccugu

SEQ ID NO: 821279 - RNA, 20 nt, Artificial Sequence
  Synthetic
ugcuuucauuuucuaccugu

SEQ ID NO: 821280 - RNA, 20 nt, Artificial Sequence
  Synthetic
uguuauauuuugguaccugu

SEQ ID NO: 821281 - RNA, 20 nt, Artificial Sequence
  Synthetic
uuuaguuacaaugacccugu

SEQ ID NO: 821282 - RNA, 20 nt, Artificial Sequence
  Synthetic
uugguaagcuccaccccugu

SEQ ID NO: 821283 - RNA, 20 nt, Artificial Sequence
  Synthetic
caaaggcagauguccccugu

SEQ ID NO: 821284 - RNA, 20 nt, Artificial Sequence
  Synthetic
uuagauucuaagugcccugu

SEQ ID NO: 821285 - RNA, 20 nt, Artificial Sequence
  Synthetic
uuuucauuacuucucccugu

SEQ ID NO: 821286 - RNA, 20 nt, Artificial Sequence
  Synthetic
aguaacucgauauucccugu

SEQ ID NO: 821287 - RNA, 20 nt, Artificial Sequence
  Synthetic
uaguacagccucuucccugu

SEQ ID NO: 821288 - RNA, 20 nt, Artificial Sequence
  Synthetic
uuccuugaauuuaagccugu

SEQ ID NO: 821289 - RNA, 20 nt, Artificial Sequence
  Synthetic
ccaugugguguugagccugu

SEQ ID NO: 821290 - RNA, 20 nt, Artificial Sequence
  Synthetic
caacacacacugaggccugu

SEQ ID NO: 821291 - RNA, 20 nt, Artificial Sequence
  Synthetic
auggguugaguguggccugu

SEQ ID NO: 821292 - RNA, 20 nt, Artificial Sequence
  Synthetic
ucuuaaagaaagaugccugu

SEQ ID NO: 821293 - RNA, 20 nt, Artificial Sequence
  Synthetic
ucagaguugccacugccugu

SEQ ID NO: 821294 - RNA, 20 nt, Artificial Sequence
  Synthetic
ugaguccuuucucugccugu

SEQ ID NO: 821295 - RNA, 20 nt, Artificial Sequence
  Synthetic
caacacacacuggugccugu

SEQ ID NO: 821296 - RNA, 20 nt, Artificial Sequence
  Synthetic
aaggccacucaucauccugu

SEQ ID NO: 821297 - RNA, 20 nt, Artificial Sequence
  Synthetic
uauuuuaacauugauccugu

SEQ ID NO: 821298 - RNA, 20 nt, Artificial Sequence
  Synthetic
uugguuucucauucuccugu

SEQ ID NO: 821299 - RNA, 20 nt, Artificial Sequence
  Synthetic
uauuuccugcuuucuccugu

SEQ ID NO: 821300 - RNA, 20 nt, Artificial Sequence
  Synthetic
aauaauaaaaccuguccugu

SEQ ID NO: 821301 - RNA, 20 nt, Artificial Sequence
  Synthetic
ucuucuuccugcuguccugu

SEQ ID NO: 821302 - RNA, 20 nt, Artificial Sequence
  Synthetic
agugcugcaaaacuuccugu

SEQ ID NO: 821303 - RNA, 20 nt, Artificial Sequence
  Synthetic
cuucaaugugaaguuccugu

SEQ ID NO: 821304 - RNA, 20 nt, Artificial Sequence
  Synthetic
auuucuaauauauuuccugu

SEQ ID NO: 821305 - RNA, 20 nt, Artificial Sequence
  Synthetic
acuuaugaaguguuuccugu

SEQ ID NO: 821306 - RNA, 20 nt, Artificial Sequence
  Synthetic
uuuauuucauuuuuuccugu

SEQ ID NO: 821307 - RNA, 20 nt, Artificial Sequence
  Synthetic
aaauaauucugcaaagcugu

SEQ ID NO: 821308 - RNA, 20 nt, Artificial Sequence
  Synthetic
acucuccucaaauaagcugu

SEQ ID NO: 821309 - RNA, 20 nt, Artificial Sequence
  Synthetic
agagagaaauuuacagcugu

SEQ ID NO: 821310 - RNA, 20 nt, Artificial Sequence
  Synthetic
cacggggaaggggcagcugu

SEQ ID NO: 821311 - RNA, 20 nt, Artificial Sequence
  Synthetic
uccgugaacugggcagcugu

SEQ ID NO: 821312 - RNA, 20 nt, Artificial Sequence
  Synthetic
auaguaaacacuucagcugu

SEQ ID NO: 821313 - RNA, 20 nt, Artificial Sequence
  Synthetic
uggaaauugccuucagcugu

SEQ ID NO: 821314 - RNA, 20 nt, Artificial Sequence
  Synthetic
aggauaaaggaaugagcugu

SEQ ID NO: 821315 - RNA, 20 nt, Artificial Sequence
  Synthetic
uggacugaaaagugagcugu

SEQ ID NO: 821316 - RNA, 20 nt, Artificial Sequence
  Synthetic
aguucugauaagguagcugu

SEQ ID NO: 821317 - RNA, 20 nt, Artificial Sequence
  Synthetic
uugugcaugauguuagcugu

SEQ ID NO: 821318 - RNA, 20 nt, Artificial Sequence
  Synthetic
aagggaacauuauacgcugu

SEQ ID NO: 821319 - RNA, 20 nt, Artificial Sequence
  Synthetic
auaagugggagcuacgcugu

SEQ ID NO: 821320 - RNA, 20 nt, Artificial Sequence
  Synthetic
cacuaugcugccaaggcugu

SEQ ID NO: 821321 - RNA, 20 nt, Artificial Sequence
  Synthetic
uuuaaguagcaucaggcugu

SEQ ID NO: 821322 - RNA, 20 nt, Artificial Sequence
  Synthetic
cugcauguugcggaggcugu

SEQ ID NO: 821323 - RNA, 20 nt, Artificial Sequence
  Synthetic
caacuaauauacugggcugu

SEQ ID NO: 821324 - RNA, 20 nt, Artificial Sequence
  Synthetic
auugagaagaccugggcugu

SEQ ID NO: 821325 - RNA, 20 nt, Artificial Sequence
  Synthetic
auuccuagaagcugggcugu

SEQ ID NO: 821326 - RNA, 20 nt, Artificial Sequence
  Synthetic
uucaguaugauaauggcugu

SEQ ID NO: 821327 - RNA, 20 nt, Artificial Sequence
  Synthetic
acacaggagccacuggcugu

SEQ ID NO: 821328 - RNA, 20 nt, Artificial Sequence
  Synthetic
uucaguaugauacuggcugu

SEQ ID NO: 821329 - RNA, 20 nt, Artificial Sequence
  Synthetic
uaauacugaacccuggcugu

SEQ ID NO: 821330 - RNA, 20 nt, Artificial Sequence
  Synthetic
uucaguaugauauuggcugu

SEQ ID NO: 821331 - RNA, 20 nt, Artificial Sequence
  Synthetic
ucccucauauccuuggcugu

SEQ ID NO: 821332 - RNA, 20 nt, Artificial Sequence
  Synthetic
auucuguagcaaaaugcugu

SEQ ID NO: 821333 - RNA, 20 nt, Artificial Sequence
  Synthetic
uacaaugcuuugaaugcugu

SEQ ID NO: 821334 - RNA, 20 nt, Artificial Sequence
  Synthetic
ccucagaggauucaugcugu

SEQ ID NO: 821335 - RNA, 20 nt, Artificial Sequence
  Synthetic
uuucuacgauuucaugcugu

SEQ ID NO: 821336 - RNA, 20 nt, Artificial Sequence
  Synthetic
aucuaaguaauggaugcugu

SEQ ID NO: 821337 - RNA, 20 nt, Artificial Sequence
  Synthetic
uauugugugggugaugcugu

SEQ ID NO: 821338 - RNA, 20 nt, Artificial Sequence
  Synthetic
cacacucuggggacugcugu

SEQ ID NO: 821339 - RNA, 20 nt, Artificial Sequence
  Synthetic
uguaagugaaauacugcugu

SEQ ID NO: 821340 - RNA, 20 nt, Artificial Sequence
  Synthetic
cacacacuggggccugcugu

SEQ ID NO: 821341 - RNA, 20 nt, Artificial Sequence
  Synthetic
agucuuggugcagcugcugu

SEQ ID NO: 821342 - RNA, 20 nt, Artificial Sequence
  Synthetic
cauuacaauuacucugcugu

SEQ ID NO: 821343 - RNA, 20 nt, Artificial Sequence
  Synthetic
uuccaaggaaacagugcugu

SEQ ID NO: 821344 - RNA, 20 nt, Artificial Sequence
  Synthetic
ccuggggaagucagugcugu

SEQ ID NO: 821345 - RNA, 20 nt, Artificial Sequence
  Synthetic
uaguuuucacugagugcugu

SEQ ID NO: 821346 - RNA, 20 nt, Artificial Sequence
  Synthetic
caggaaugugcuggugcugu

SEQ ID NO: 821347 - RNA, 20 nt, Artificial Sequence
  Synthetic
agaauuuaguaacuugcugu

SEQ ID NO: 821348 - RNA, 20 nt, Artificial Sequence
  Synthetic
uaaaaaauaaagguugcugu

SEQ ID NO: 821349 - RNA, 20 nt, Artificial Sequence
  Synthetic
caacuuuaucaaaaaucugu

SEQ ID NO: 821350 - RNA, 20 nt, Artificial Sequence
  Synthetic
uagugcccucaaaaaucugu

SEQ ID NO: 821351 - RNA, 20 nt, Artificial Sequence
  Synthetic
agaaagcucacaaaaucugu

SEQ ID NO: 821352 - RNA, 20 nt, Artificial Sequence
  Synthetic
acagauauaucaaaaucugu

SEQ ID NO: 821353 - RNA, 20 nt, Artificial Sequence
  Synthetic
aaaaucauaauuaaaucugu

SEQ ID NO: 821354 - RNA, 20 nt, Artificial Sequence
  Synthetic
aauaucuucucccaaucugu

SEQ ID NO: 821355 - RNA, 20 nt, Artificial Sequence
  Synthetic
ucuguaaaguggcaaucugu

SEQ ID NO: 821356 - RNA, 20 nt, Artificial Sequence
  Synthetic
auuucuuaucugcaaucugu

SEQ ID NO: 821357 - RNA, 20 nt, Artificial Sequence
  Synthetic
auagguuagagagaaucugu

SEQ ID NO: 821358 - RNA, 20 nt, Artificial Sequence
  Synthetic
aggaaauugagugaaucugu

SEQ ID NO: 821359 - RNA, 20 nt, Artificial Sequence
  Synthetic
caccauagccgguaaucugu

SEQ ID NO: 821360 - RNA, 20 nt, Artificial Sequence
  Synthetic
aagaaaaaaauaccaucugu

SEQ ID NO: 821361 - RNA, 20 nt, Artificial Sequence
  Synthetic
auuaaaguuucugcaucugu

SEQ ID NO: 821362 - RNA, 20 nt, Artificial Sequence
  Synthetic
uaagguguuuucucaucugu

SEQ ID NO: 821363 - RNA, 20 nt, Artificial Sequence
  Synthetic
auaagucucacgagaucugu

SEQ ID NO: 821364 - RNA, 20 nt, Artificial Sequence
  Synthetic
auauauguggaaugaucugu

SEQ ID NO: 821365 - RNA, 20 nt, Artificial Sequence
  Synthetic
cauaaugaaguaauaucugu

SEQ ID NO: 821366 - RNA, 20 nt, Artificial Sequence
  Synthetic
uggguccuggccauaucugu

SEQ ID NO: 821367 - RNA, 20 nt, Artificial Sequence
  Synthetic
augaaaacuaagauaucugu

SEQ ID NO: 821368 - RNA, 20 nt, Artificial Sequence
  Synthetic
uuaaauaucacacuaucugu

SEQ ID NO: 821369 - RNA, 20 nt, Artificial Sequence
  Synthetic
cuccaccacuuucuaucugu

SEQ ID NO: 821370 - RNA, 20 nt, Artificial Sequence
  Synthetic
acagggauguuguuaucugu

SEQ ID NO: 821371 - RNA, 20 nt, Artificial Sequence
  Synthetic
aaccuaggcacgcacucugu

SEQ ID NO: 821372 - RNA, 20 nt, Artificial Sequence
  Synthetic
ugccaaaauccucacucugu

SEQ ID NO: 821373 - RNA, 20 nt, Artificial Sequence
  Synthetic
uuauguucuguucacucugu

SEQ ID NO: 821374 - RNA, 20 nt, Artificial Sequence
  Synthetic
uacugaaucagagacucugu

SEQ ID NO: 821375 - RNA, 20 nt, Artificial Sequence
  Synthetic
aauaauuuauccuacucugu

SEQ ID NO: 821376 - RNA, 20 nt, Artificial Sequence
  Synthetic
cuucuuugggauuacucugu

SEQ ID NO: 821377 - RNA, 20 nt, Artificial Sequence
  Synthetic
aauaauuuuaucaccucugu

SEQ ID NO: 821378 - RNA, 20 nt, Artificial Sequence
  Synthetic
cgugcuucugcgcccucugu

SEQ ID NO: 821379 - RNA, 20 nt, Artificial Sequence
  Synthetic
acaaaauaccuggccucugu

SEQ ID NO: 821380 - RNA, 20 nt, Artificial Sequence
  Synthetic
aguuugaaccucagcucugu

SEQ ID NO: 821381 - RNA, 20 nt, Artificial Sequence
  Synthetic
cauuuuauuuauagcucugu

SEQ ID NO: 821382 - RNA, 20 nt, Artificial Sequence
  Synthetic
agucuuaucauuagcucugu

SEQ ID NO: 821383 - RNA, 20 nt, Artificial Sequence
  Synthetic
uagcucccuaaucgcucugu

SEQ ID NO: 821384 - RNA, 20 nt, Artificial Sequence
  Synthetic
ucaucuugguuaggcucugu

SEQ ID NO: 821385 - RNA, 20 nt, Artificial Sequence
  Synthetic
uuaacuuuuucagucucugu

SEQ ID NO: 821386 - RNA, 20 nt, Artificial Sequence
  Synthetic
cuuuuuuuaguagucucugu

SEQ ID NO: 821387 - RNA, 20 nt, Artificial Sequence
  Synthetic
uuauugauacaggucucugu

SEQ ID NO: 821388 - RNA, 20 nt, Artificial Sequence
  Synthetic
augggccauuuggucucugu

SEQ ID NO: 821389 - RNA, 20 nt, Artificial Sequence
  Synthetic
auucuacuaugugucucugu

SEQ ID NO: 821390 - RNA, 20 nt, Artificial Sequence
  Synthetic
uugcugggcugauucucugu

SEQ ID NO: 821391 - RNA, 20 nt, Artificial Sequence
  Synthetic
cugcugggugccuucucugu

SEQ ID NO: 821392 - RNA, 20 nt, Artificial Sequence
  Synthetic
cucugucuccuguucucugu

SEQ ID NO: 821393 - RNA, 20 nt, Artificial Sequence
  Synthetic
uauaauugcacacagucugu

SEQ ID NO: 821394 - RNA, 20 nt, Artificial Sequence
  Synthetic
agucauccuucagugucugu

SEQ ID NO: 821395 - RNA, 20 nt, Artificial Sequence
  Synthetic
uuuugaguagcuuugucugu

SEQ ID NO: 821396 - RNA, 20 nt, Artificial Sequence
  Synthetic
uaucauauuauuaauucugu

SEQ ID NO: 821397 - RNA, 20 nt, Artificial Sequence
  Synthetic
aaaauuuucucccauucugu

SEQ ID NO: 821398 - RNA, 20 nt, Artificial Sequence
  Synthetic
aacauuuucucccauucugu

SEQ ID NO: 821399 - RNA, 20 nt, Artificial Sequence
  Synthetic
aaaguuuucucucauucugu

SEQ ID NO: 821400 - RNA, 20 nt, Artificial Sequence
  Synthetic
uaauuuuguucauauucugu

SEQ ID NO: 821401 - RNA, 20 nt, Artificial Sequence
  Synthetic
aauugauuucucuauucugu

SEQ ID NO: 821402 - RNA, 20 nt, Artificial Sequence
  Synthetic
uuaucugcuucuuauucugu

SEQ ID NO: 821403 - RNA, 20 nt, Artificial Sequence
  Synthetic
ccaaauguccaaacuucugu

SEQ ID NO: 821404 - RNA, 20 nt, Artificial Sequence
  Synthetic
caauaacagaguacuucugu

SEQ ID NO: 821405 - RNA, 20 nt, Artificial Sequence
  Synthetic
uuuucgcauuaaccuucugu

SEQ ID NO: 821406 - RNA, 20 nt, Artificial Sequence
  Synthetic
agguaaauaaauccuucugu

SEQ ID NO: 821407 - RNA, 20 nt, Artificial Sequence
  Synthetic
cagucccucacggcuucugu

SEQ ID NO: 821408 - RNA, 20 nt, Artificial Sequence
  Synthetic
agaggaaagugcucuucugu

SEQ ID NO: 821409 - RNA, 20 nt, Artificial Sequence
  Synthetic
ucaugcauugcuucuucugu

SEQ ID NO: 821410 - RNA, 20 nt, Artificial Sequence
  Synthetic
acuggcuacaucaguucugu

SEQ ID NO: 821411 - RNA, 20 nt, Artificial Sequence
  Synthetic
uuaucacucauagguucugu

SEQ ID NO: 821412 - RNA, 20 nt, Artificial Sequence
  Synthetic
cuuccaugaauauguucugu

SEQ ID NO: 821413 - RNA, 20 nt, Artificial Sequence
  Synthetic
uuauuuuauugguguucugu

SEQ ID NO: 821414 - RNA, 20 nt, Artificial Sequence
  Synthetic
uaguaaaauggaauuucugu

SEQ ID NO: 821415 - RNA, 20 nt, Artificial Sequence
  Synthetic
cuagucuuucuaauuucugu

SEQ ID NO: 821416 - RNA, 20 nt, Artificial Sequence
  Synthetic
uaauaacuaugcauuucugu

SEQ ID NO: 821417 - RNA, 20 nt, Artificial Sequence
  Synthetic
ccccuuuuggcuauuucugu

SEQ ID NO: 821418 - RNA, 20 nt, Artificial Sequence
  Synthetic
acgguaguuuguauuucugu

SEQ ID NO: 821419 - RNA, 20 nt, Artificial Sequence
  Synthetic
augguaguuuguauuucugu

SEQ ID NO: 821420 - RNA, 20 nt, Artificial Sequence
  Synthetic
acuuaugcccaccuuucugu

SEQ ID NO: 821421 - RNA, 20 nt, Artificial Sequence
  Synthetic
aauauuuucucccuuucugu

SEQ ID NO: 821422 - RNA, 20 nt, Artificial Sequence
  Synthetic
aggaggcuagagcuuucugu

SEQ ID NO: 821423 - RNA, 20 nt, Artificial Sequence
  Synthetic
ucuuaaugaacauuuucugu

SEQ ID NO: 821424 - RNA, 20 nt, Artificial Sequence
  Synthetic
uguauauauauuuuuucugu

SEQ ID NO: 821425 - RNA, 20 nt, Artificial Sequence
  Synthetic
auuuugagaauaaaaagugu

SEQ ID NO: 821426 - RNA, 20 nt, Artificial Sequence
  Synthetic
auacaaaagauaaaaagugu

SEQ ID NO: 821427 - RNA, 20 nt, Artificial Sequence
  Synthetic
aagugaucacuaaaaagugu

SEQ ID NO: 821428 - RNA, 20 nt, Artificial Sequence
  Synthetic
aaacuggagaucaaaagugu

SEQ ID NO: 821429 - RNA, 20 nt, Artificial Sequence
  Synthetic
aaaagacaaaagaaaagugu

SEQ ID NO: 821430 - RNA, 20 nt, Artificial Sequence
  Synthetic
cuccuaguagcuaaaagugu

SEQ ID NO: 821431 - RNA, 20 nt, Artificial Sequence
  Synthetic
agauaauguuuacaaagugu

SEQ ID NO: 821432 - RNA, 20 nt, Artificial Sequence
  Synthetic
accucggccccccaaagugu

SEQ ID NO: 821433 - RNA, 20 nt, Artificial Sequence
  Synthetic
acuucggccucccaaagugu

SEQ ID NO: 821434 - RNA, 20 nt, Artificial Sequence
  Synthetic
ucuaaaacucuccaaagugu

SEQ ID NO: 821435 - RNA, 20 nt, Artificial Sequence
  Synthetic
agcaguuguuuucaaagugu

SEQ ID NO: 821436 - RNA, 20 nt, Artificial Sequence
  Synthetic
ugagaagacaaagaaagugu

SEQ ID NO: 821437 - RNA, 20 nt, Artificial Sequence
  Synthetic
uaaacaauaaaggaaagugu

SEQ ID NO: 821438 - RNA, 20 nt, Artificial Sequence
  Synthetic
ccuggaaagugggaaagugu

SEQ ID NO: 821439 - RNA, 20 nt, Artificial Sequence
  Synthetic
ucugguccuauggaaagugu

SEQ ID NO: 821440 - RNA, 20 nt, Artificial Sequence
  Synthetic
auggauuaaaaugaaagugu

SEQ ID NO: 821441 - RNA, 20 nt, Artificial Sequence
  Synthetic
cuggugaucuccacaagugu

SEQ ID NO: 821442 - RNA, 20 nt, Artificial Sequence
  Synthetic
ugaaauauaaugccaagugu

SEQ ID NO: 821443 - RNA, 20 nt, Artificial Sequence
  Synthetic
aacuucuugaauccaagugu

SEQ ID NO: 821444 - RNA, 20 nt, Artificial Sequence
  Synthetic
uggauuuacagaucaagugu

SEQ ID NO: 821445 - RNA, 20 nt, Artificial Sequence
  Synthetic
aacaccugagucagaagugu

SEQ ID NO: 821446 - RNA, 20 nt, Artificial Sequence
  Synthetic
uggggcuuaacgggaagugu

SEQ ID NO: 821447 - RNA, 20 nt, Artificial Sequence
  Synthetic
caaaagacauugggaagugu

SEQ ID NO: 821448 - RNA, 20 nt, Artificial Sequence
  Synthetic
caccuuuuucagugaagugu

SEQ ID NO: 821449 - RNA, 20 nt, Artificial Sequence
  Synthetic
cugaaugaguauugaagugu

SEQ ID NO: 821450 - RNA, 20 nt, Artificial Sequence
  Synthetic
ucacaaggaaaaauaagugu

SEQ ID NO: 821451 - RNA, 20 nt, Artificial Sequence
  Synthetic
uguucuaaagauguaagugu

SEQ ID NO: 821452 - RNA, 20 nt, Artificial Sequence
  Synthetic
uuacagcaauguguaagugu

SEQ ID NO: 821453 - RNA, 20 nt, Artificial Sequence
  Synthetic
uuuaagaguuauaacagugu

SEQ ID NO: 821454 - RNA, 20 nt, Artificial Sequence
  Synthetic
acaccacagccccccagugu

SEQ ID NO: 821455 - RNA, 20 nt, Artificial Sequence
  Synthetic
aauggcaucccugccagugu

SEQ ID NO: 821456 - RNA, 20 nt, Artificial Sequence
  Synthetic
aaauacacaaucuccagugu

SEQ ID NO: 821457 - RNA, 20 nt, Artificial Sequence
  Synthetic
uuauagccaaggagcagugu

SEQ ID NO: 821458 - RNA, 20 nt, Artificial Sequence
  Synthetic
ccguuucucuacaucagugu

SEQ ID NO: 821459 - RNA, 20 nt, Artificial Sequence
  Synthetic
aaaaacauagccaucagugu

SEQ ID NO: 821460 - RNA, 20 nt, Artificial Sequence
  Synthetic
uguuuuuaaagauucagugu

SEQ ID NO: 821461 - RNA, 20 nt, Artificial Sequence
  Synthetic
aaucaaaaugcuuucagugu

SEQ ID NO: 821462 - RNA, 20 nt, Artificial Sequence
  Synthetic
ccugucccugaaaagagugu

SEQ ID NO: 821463 - RNA, 20 nt, Artificial Sequence
  Synthetic
ugcaacucaguaaagagugu

SEQ ID NO: 821464 - RNA, 20 nt, Artificial Sequence
  Synthetic
ugaacccauuucaagagugu

SEQ ID NO: 821465 - RNA, 20 nt, Artificial Sequence
  Synthetic
ccagaggcugggaagagugu

SEQ ID NO: 821466 - RNA, 20 nt, Artificial Sequence
  Synthetic
aacacauuuuagcagagugu

SEQ ID NO: 821467 - RNA, 20 nt, Artificial Sequence
  Synthetic
ucaaagucauugaugagugu

SEQ ID NO: 821468 - RNA, 20 nt, Artificial Sequence
  Synthetic
aaucuuaauaugaauagugu

SEQ ID NO: 821469 - RNA, 20 nt, Artificial Sequence
  Synthetic
acuccuauucaacauagugu

SEQ ID NO: 821470 - RNA, 20 nt, Artificial Sequence
  Synthetic
auaaagaggaagcauagugu

SEQ ID NO: 821471 - RNA, 20 nt, Artificial Sequence
  Synthetic
aaaccucaaacuacuagugu

SEQ ID NO: 821472 - RNA, 20 nt, Artificial Sequence
  Synthetic
aggaauaauauugguagugu

SEQ ID NO: 821473 - RNA, 20 nt, Artificial Sequence
  Synthetic
aggaggcauccuuguagugu

SEQ ID NO: 821474 - RNA, 20 nt, Artificial Sequence
  Synthetic
uguacuuuauagcuuagugu

SEQ ID NO: 821475 - RNA, 20 nt, Artificial Sequence
  Synthetic
ugaucccucccaggacgugu

SEQ ID NO: 821476 - RNA, 20 nt, Artificial Sequence
  Synthetic
uaucuauacaugugccgugu

SEQ ID NO: 821477 - RNA, 20 nt, Artificial Sequence
  Synthetic
auucaagugcuaacgcgugu

SEQ ID NO: 821478 - RNA, 20 nt, Artificial Sequence
  Synthetic
caaaaauuggccaggcgugu

SEQ ID NO: 821479 - RNA, 20 nt, Artificial Sequence
  Synthetic
uuuuguuaauuaaaaggugu

SEQ ID NO: 821480 - RNA, 20 nt, Artificial Sequence
  Synthetic
uaauauauuugcaaaggugu

SEQ ID NO: 821481 - RNA, 20 nt, Artificial Sequence
  Synthetic
aagcugggggauaaaggugu

SEQ ID NO: 821482 - RNA, 20 nt, Artificial Sequence
  Synthetic
uuucaaaggcugcaaggugu

SEQ ID NO: 821483 - RNA, 20 nt, Artificial Sequence
  Synthetic
cccagugaugaggaaggugu

SEQ ID NO: 821484 - RNA, 20 nt, Artificial Sequence
  Synthetic
acauguguuggugaaggugu

SEQ ID NO: 821485 - RNA, 20 nt, Artificial Sequence
  Synthetic
aacuaaccaaaguaaggugu

SEQ ID NO: 821486 - RNA, 20 nt, Artificial Sequence
  Synthetic
uacaaaaauuagccaggugu

SEQ ID NO: 821487 - RNA, 20 nt, Artificial Sequence
  Synthetic
augugcuacugaagaggugu

SEQ ID NO: 821488 - RNA, 20 nt, Artificial Sequence
  Synthetic
cgcuugaaccugggaggugu

SEQ ID NO: 821489 - RNA, 20 nt, Artificial Sequence
  Synthetic
uaacuaauuauaugaggugu

SEQ ID NO: 821490 - RNA, 20 nt, Artificial Sequence
  Synthetic
auguuaagccacugaggugu

SEQ ID NO: 821491 - RNA, 20 nt, Artificial Sequence
  Synthetic
aaaacauauauaauaggugu

SEQ ID NO: 821492 - RNA, 20 nt, Artificial Sequence
  Synthetic
aaaggcugcacacuaggugu

SEQ ID NO: 821493 - RNA, 20 nt, Artificial Sequence
  Synthetic
ugccauaaaaaucuaggugu

SEQ ID NO: 821494 - RNA, 20 nt, Artificial Sequence
  Synthetic
aaagccaggagucuaggugu

SEQ ID NO: 821495 - RNA, 20 nt, Artificial Sequence
  Synthetic
aagcccuagcuccagggugu

SEQ ID NO: 821496 - RNA, 20 nt, Artificial Sequence
  Synthetic
cucaggauugggcagggugu

SEQ ID NO: 821497 - RNA, 20 nt, Artificial Sequence
  Synthetic
aggggacgcagguggggugu

SEQ ID NO: 821498 - RNA, 20 nt, Artificial Sequence
  Synthetic
uucaaaaauuaacugggugu

SEQ ID NO: 821499 - RNA, 20 nt, Artificial Sequence
  Synthetic
cagaauuucagagugggugu

SEQ ID NO: 821500 - RNA, 20 nt, Artificial Sequence
  Synthetic
cugaacaugcaugugggugu

SEQ ID NO: 821501 - RNA, 20 nt, Artificial Sequence
  Synthetic
cccuauuuaauaaauggugu

SEQ ID NO: 821502 - RNA, 20 nt, Artificial Sequence
  Synthetic
uccuauaaauuaaauggugu

SEQ ID NO: 821503 - RNA, 20 nt, Artificial Sequence
  Synthetic
augaaguaagcacauggugu

SEQ ID NO: 821504 - RNA, 20 nt, Artificial Sequence
  Synthetic
agaucuaaucuccauggugu

SEQ ID NO: 821505 - RNA, 20 nt, Artificial Sequence
  Synthetic
uuagcuggcugugauggugu

SEQ ID NO: 821506 - RNA, 20 nt, Artificial Sequence
  Synthetic
caaauguaccacucuggugu

SEQ ID NO: 821507 - RNA, 20 nt, Artificial Sequence
  Synthetic
uggggagguggggguggugu

SEQ ID NO: 821508 - RNA, 20 nt, Artificial Sequence
  Synthetic
uaguggcuuacauguggugu

SEQ ID NO: 821509 - RNA, 20 nt, Artificial Sequence
  Synthetic
aguuuguauuucuguggugu

SEQ ID NO: 821510 - RNA, 20 nt, Artificial Sequence
  Synthetic
ugauugggaagguguggugu

SEQ ID NO: 821511 - RNA, 20 nt, Artificial Sequence
  Synthetic
aauuguuagccauuuggugu

SEQ ID NO: 821512 - RNA, 20 nt, Artificial Sequence
  Synthetic
caaaauggcugcuuuggugu

SEQ ID NO: 821513 - RNA, 20 nt, Artificial Sequence
  Synthetic
aguauugucauaaaaugugu

SEQ ID NO: 821514 - RNA, 20 nt, Artificial Sequence
  Synthetic
cuuuaugcucacaaaugugu

SEQ ID NO: 821515 - RNA, 20 nt, Artificial Sequence
  Synthetic
aagaugcaaaagaaaugugu

SEQ ID NO: 821516 - RNA, 20 nt, Artificial Sequence
  Synthetic
acaagcuagaaacaaugugu

SEQ ID NO: 821517 - RNA, 20 nt, Artificial Sequence
  Synthetic
uucuuucuaauucaaugugu

SEQ ID NO: 821518 - RNA, 20 nt, Artificial Sequence
  Synthetic
acuuagauuuuucaaugugu

SEQ ID NO: 821519 - RNA, 20 nt, Artificial Sequence
  Synthetic
aagaugggaucagaaugugu

SEQ ID NO: 821520 - RNA, 20 nt, Artificial Sequence
  Synthetic
uuaucacaucuggaaugugu

SEQ ID NO: 821521 - RNA, 20 nt, Artificial Sequence
  Synthetic
cauagcguuguaacaugugu

SEQ ID NO: 821522 - RNA, 20 nt, Artificial Sequence
  Synthetic
agacucagggguacaugugu

SEQ ID NO: 821523 - RNA, 20 nt, Artificial Sequence
  Synthetic
cccaagaucauuacaugugu

SEQ ID NO: 821524 - RNA, 20 nt, Artificial Sequence
  Synthetic
agccauucugauagaugugu

SEQ ID NO: 821525 - RNA, 20 nt, Artificial Sequence
  Synthetic
cauauugugucaauaugugu

SEQ ID NO: 821526 - RNA, 20 nt, Artificial Sequence
  Synthetic
aacgauaaaaggauaugugu

SEQ ID NO: 821527 - RNA, 20 nt, Artificial Sequence
  Synthetic
uauuuaucauuuauaugugu

SEQ ID NO: 821528 - RNA, 20 nt, Artificial Sequence
  Synthetic
uaagcauugucaguaugugu

SEQ ID NO: 821529 - RNA, 20 nt, Artificial Sequence
  Synthetic
cuggcagccuuucccugugu

SEQ ID NO: 821530 - RNA, 20 nt, Artificial Sequence
  Synthetic
uauuauaauuaagccugugu

SEQ ID NO: 821531 - RNA, 20 nt, Artificial Sequence
  Synthetic
aggauacaaaagggcugugu

SEQ ID NO: 821532 - RNA, 20 nt, Artificial Sequence
  Synthetic
ccccaguggggacucugugu

SEQ ID NO: 821533 - RNA, 20 nt, Artificial Sequence
  Synthetic
uggcuaucaagagucugugu

SEQ ID NO: 821534 - RNA, 20 nt, Artificial Sequence
  Synthetic
uuuuauucuaaauucugugu

SEQ ID NO: 821535 - RNA, 20 nt, Artificial Sequence
  Synthetic
aaagggaaaacauucugugu

SEQ ID NO: 821536 - RNA, 20 nt, Artificial Sequence
  Synthetic
uccccaucuucuuucugugu

SEQ ID NO: 821537 - RNA, 20 nt, Artificial Sequence
  Synthetic
uucucagauuguuucugugu

SEQ ID NO: 821538 - RNA, 20 nt, Artificial Sequence
  Synthetic
cuguggaauuguaagugugu

SEQ ID NO: 821539 - RNA, 20 nt, Artificial Sequence
  Synthetic
auuauaguucuuaagugugu

SEQ ID NO: 821540 - RNA, 20 nt, Artificial Sequence
  Synthetic
ugaaauagaagauagugugu

SEQ ID NO: 821541 - RNA, 20 nt, Artificial Sequence
  Synthetic
cugcuggcacuaacgugugu

SEQ ID NO: 821542 - RNA, 20 nt, Artificial Sequence
  Synthetic
ucaauugaucaaaggugugu

SEQ ID NO: 821543 - RNA, 20 nt, Artificial Sequence
  Synthetic
uugauggauucaaggugugu

SEQ ID NO: 821544 - RNA, 20 nt, Artificial Sequence
  Synthetic
cugaaugcugaauggugugu

SEQ ID NO: 821545 - RNA, 20 nt, Artificial Sequence
  Synthetic
cuuucuucuaaaaugugugu

SEQ ID NO: 821546 - RNA, 20 nt, Artificial Sequence
  Synthetic
uccuaucaacagaugugugu

SEQ ID NO: 821547 - RNA, 20 nt, Artificial Sequence
  Synthetic
agaauucagugacugugugu

SEQ ID NO: 821548 - RNA, 20 nt, Artificial Sequence
  Synthetic
cugauaacccagcugugugu

SEQ ID NO: 821549 - RNA, 20 nt, Artificial Sequence
  Synthetic
uugguguuggaugugugugu

SEQ ID NO: 821550 - RNA, 20 nt, Artificial Sequence
  Synthetic
uuguauguguaugugugugu

SEQ ID NO: 821551 - RNA, 20 nt, Artificial Sequence
  Synthetic
aauugcgacugugugugugu

SEQ ID NO: 821552 - RNA, 20 nt, Artificial Sequence
  Synthetic
uggugugugugugugugugu

SEQ ID NO: 821553 - RNA, 20 nt, Artificial Sequence
  Synthetic
aguuacuauugugugugugu

SEQ ID NO: 821554 - RNA, 20 nt, Artificial Sequence
  Synthetic
cuaaauugaucauugugugu

SEQ ID NO: 821555 - RNA, 20 nt, Artificial Sequence
  Synthetic
aauuuuccuguuuugugugu

SEQ ID NO: 821556 - RNA, 20 nt, Artificial Sequence
  Synthetic
aaagccuccauucauugugu

SEQ ID NO: 821557 - RNA, 20 nt, Artificial Sequence
  Synthetic
cugugaacaagagauugugu

SEQ ID NO: 821558 - RNA, 20 nt, Artificial Sequence
  Synthetic
caacuucucugauauugugu

SEQ ID NO: 821559 - RNA, 20 nt, Artificial Sequence
  Synthetic
agaaagacaaucuauugugu

SEQ ID NO: 821560 - RNA, 20 nt, Artificial Sequence
  Synthetic
aacccuugacugacuugugu

SEQ ID NO: 821561 - RNA, 20 nt, Artificial Sequence
  Synthetic
uuuuauguaugaccuugugu

SEQ ID NO: 821562 - RNA, 20 nt, Artificial Sequence
  Synthetic
uauuggcuugguccuugugu

SEQ ID NO: 821563 - RNA, 20 nt, Artificial Sequence
  Synthetic
uuucuauaaggagcuugugu

SEQ ID NO: 821564 - RNA, 20 nt, Artificial Sequence
  Synthetic
uucaagaaauuggcuugugu

SEQ ID NO: 821565 - RNA, 20 nt, Artificial Sequence
  Synthetic
auaauacuuccugcuugugu

SEQ ID NO: 821566 - RNA, 20 nt, Artificial Sequence
  Synthetic
cuguuguuuccugcuugugu

SEQ ID NO: 821567 - RNA, 20 nt, Artificial Sequence
  Synthetic
cauuggucauuuauuugugu

SEQ ID NO: 821568 - RNA, 20 nt, Artificial Sequence
  Synthetic
uuucuucuggagcuuugugu

SEQ ID NO: 821569 - RNA, 20 nt, Artificial Sequence
  Synthetic
cauuuaccauugcuuugugu

SEQ ID NO: 821570 - RNA, 20 nt, Artificial Sequence
  Synthetic
aauuuuacuccucuuugugu

SEQ ID NO: 821571 - RNA, 20 nt, Artificial Sequence
  Synthetic
auaggcauugcaguuugugu

SEQ ID NO: 821572 - RNA, 20 nt, Artificial Sequence
  Synthetic
uguaccaccuagguuugugu

SEQ ID NO: 821573 - RNA, 20 nt, Artificial Sequence
  Synthetic
cucaaguuauagaaaauugu

SEQ ID NO: 821574 - RNA, 20 nt, Artificial Sequence
  Synthetic
ucuuaagccacuaaaauugu

SEQ ID NO: 821575 - RNA, 20 nt, Artificial Sequence
  Synthetic
agccucaaucaccaaauugu

SEQ ID NO: 821576 - RNA, 20 nt, Artificial Sequence
  Synthetic
cacauucaacaagaaauugu

SEQ ID NO: 821577 - RNA, 20 nt, Artificial Sequence
  Synthetic
ugggagagugaggaaauugu

SEQ ID NO: 821578 - RNA, 20 nt, Artificial Sequence
  Synthetic
aaaauugucuaauaaauugu

SEQ ID NO: 821579 - RNA, 20 nt, Artificial Sequence
  Synthetic
aauugcuauauauaaauugu

SEQ ID NO: 821580 - RNA, 20 nt, Artificial Sequence
  Synthetic
uuaagugaaucuuaaauugu

SEQ ID NO: 821581 - RNA, 20 nt, Artificial Sequence
  Synthetic
agaucuggagaugcaauugu

SEQ ID NO: 821582 - RNA, 20 nt, Artificial Sequence
  Synthetic
aggaacaggaagucaauugu

SEQ ID NO: 821583 - RNA, 20 nt, Artificial Sequence
  Synthetic
uuuucaagauauagaauugu

SEQ ID NO: 821584 - RNA, 20 nt, Artificial Sequence
  Synthetic
uggccaauggguagaauugu

SEQ ID NO: 821585 - RNA, 20 nt, Artificial Sequence
  Synthetic
auuucccccuguggaauugu

SEQ ID NO: 821586 - RNA, 20 nt, Artificial Sequence
  Synthetic
uuguuguuaauaauaauugu

SEQ ID NO: 821587 - RNA, 20 nt, Artificial Sequence
  Synthetic
ucuccuauuguaauaauugu

SEQ ID NO: 821588 - RNA, 20 nt, Artificial Sequence
  Synthetic
uaauggaaaaccauaauugu

SEQ ID NO: 821589 - RNA, 20 nt, Artificial Sequence
  Synthetic
cagaagguggagauaauugu

SEQ ID NO: 821590 - RNA, 20 nt, Artificial Sequence
  Synthetic
agaacaaaaauuauaauugu

SEQ ID NO: 821591 - RNA, 20 nt, Artificial Sequence
  Synthetic
uguauauaaugacuaauugu

SEQ ID NO: 821592 - RNA, 20 nt, Artificial Sequence
  Synthetic
cauuacauaucauuaauugu

SEQ ID NO: 821593 - RNA, 20 nt, Artificial Sequence
  Synthetic
auuuuacugagauuaauugu

SEQ ID NO: 821594 - RNA, 20 nt, Artificial Sequence
  Synthetic
aacaaugcagaguuaauugu

SEQ ID NO: 821595 - RNA, 20 nt, Artificial Sequence
  Synthetic
uaccuccuaagguuaauugu

SEQ ID NO: 821596 - RNA, 20 nt, Artificial Sequence
  Synthetic
auagaaaaacuguuaauugu

SEQ ID NO: 821597 - RNA, 20 nt, Artificial Sequence
  Synthetic
augcauugaaauuuaauugu

SEQ ID NO: 821598 - RNA, 20 nt, Artificial Sequence
  Synthetic
uaaaauauugcacacauugu

SEQ ID NO: 821599 - RNA, 20 nt, Artificial Sequence
  Synthetic
augugauuauuacacauugu

SEQ ID NO: 821600 - RNA, 20 nt, Artificial Sequence
  Synthetic
agaagcugguauuacauugu

SEQ ID NO: 821601 - RNA, 20 nt, Artificial Sequence
  Synthetic
uuggcaagccucaccauugu

SEQ ID NO: 821602 - RNA, 20 nt, Artificial Sequence
  Synthetic
uaaugccucuucuccauugu

SEQ ID NO: 821603 - RNA, 20 nt, Artificial Sequence
  Synthetic
aguauauuuuauuccauugu

SEQ ID NO: 821604 - RNA, 20 nt, Artificial Sequence
  Synthetic
uggaaguuuuauuccauugu

SEQ ID NO: 821605 - RNA, 20 nt, Artificial Sequence
  Synthetic
uaucuaugucguagcauugu

SEQ ID NO: 821606 - RNA, 20 nt, Artificial Sequence
  Synthetic
aauagguagaaaggcauugu

SEQ ID NO: 821607 - RNA, 20 nt, Artificial Sequence
  Synthetic
aaaaaauaugaaggcauugu

SEQ ID NO: 821608 - RNA, 20 nt, Artificial Sequence
  Synthetic
agggcuauccuaugcauugu

SEQ ID NO: 821609 - RNA, 20 nt, Artificial Sequence
  Synthetic
aaaguuuguugcugcauugu

SEQ ID NO: 821610 - RNA, 20 nt, Artificial Sequence
  Synthetic
cugaaacacuucugcauugu

SEQ ID NO: 821611 - RNA, 20 nt, Artificial Sequence
  Synthetic
aaauguagagauugcauugu

SEQ ID NO: 821612 - RNA, 20 nt, Artificial Sequence
  Synthetic
acaauuuuuuuuugcauugu

SEQ ID NO: 821613 - RNA, 20 nt, Artificial Sequence
  Synthetic
uuaauccagucuaucauugu

SEQ ID NO: 821614 - RNA, 20 nt, Artificial Sequence
  Synthetic
uacguuguacaagucauugu

SEQ ID NO: 821615 - RNA, 20 nt, Artificial Sequence
  Synthetic
uaaucaaaacauuucauugu

SEQ ID NO: 821616 - RNA, 20 nt, Artificial Sequence
  Synthetic
augcacuguccccagauugu

SEQ ID NO: 821617 - RNA, 20 nt, Artificial Sequence
  Synthetic
ugcuuuuacaaggagauugu

SEQ ID NO: 821618 - RNA, 20 nt, Artificial Sequence
  Synthetic
aagagcacaagggagauugu

SEQ ID NO: 821619 - RNA, 20 nt, Artificial Sequence
  Synthetic
acaauuuaagaugagauugu

SEQ ID NO: 821620 - RNA, 20 nt, Artificial Sequence
  Synthetic
aaaaguaugcagaggauugu

SEQ ID NO: 821621 - RNA, 20 nt, Artificial Sequence
  Synthetic
uacuggccucauaggauugu

SEQ ID NO: 821622 - RNA, 20 nt, Artificial Sequence
  Synthetic
ccuugacauguggggauugu

SEQ ID NO: 821623 - RNA, 20 nt, Artificial Sequence
  Synthetic
uuguguagaaaauggauugu

SEQ ID NO: 821624 - RNA, 20 nt, Artificial Sequence
  Synthetic
acaaagcaggccaugauugu

SEQ ID NO: 821625 - RNA, 20 nt, Artificial Sequence
  Synthetic
ccauuaacucauaugauugu

SEQ ID NO: 821626 - RNA, 20 nt, Artificial Sequence
  Synthetic
aauuagccacgcgugauugu

SEQ ID NO: 821627 - RNA, 20 nt, Artificial Sequence
  Synthetic
cccaauggagugaauauugu

SEQ ID NO: 821628 - RNA, 20 nt, Artificial Sequence
  Synthetic
acagauauaauucauauugu

SEQ ID NO: 821629 - RNA, 20 nt, Artificial Sequence
  Synthetic
agggcuucuuuagauauugu

SEQ ID NO: 821630 - RNA, 20 nt, Artificial Sequence
  Synthetic
auucaguugguaucuauugu

SEQ ID NO: 821631 - RNA, 20 nt, Artificial Sequence
  Synthetic
agcaaagagaggucuauugu

SEQ ID NO: 821632 - RNA, 20 nt, Artificial Sequence
  Synthetic
agucaaggaagaaguauugu

SEQ ID NO: 821633 - RNA, 20 nt, Artificial Sequence
  Synthetic
uauuaagacagacguauugu

SEQ ID NO: 821634 - RNA, 20 nt, Artificial Sequence
  Synthetic
ucuauuaaugaauguauugu

SEQ ID NO: 821635 - RNA, 20 nt, Artificial Sequence
  Synthetic
aagugggaaagguguauugu

SEQ ID NO: 821636 - RNA, 20 nt, Artificial Sequence
  Synthetic
cuuuauauccaaguuauugu

SEQ ID NO: 821637 - RNA, 20 nt, Artificial Sequence
  Synthetic
uuaugcugcaggguuauugu

SEQ ID NO: 821638 - RNA, 20 nt, Artificial Sequence
  Synthetic
uaaauaaauguguuuauugu

SEQ ID NO: 821639 - RNA, 20 nt, Artificial Sequence
  Synthetic
ugggcuuugguaaaacuugu

SEQ ID NO: 821640 - RNA, 20 nt, Artificial Sequence
  Synthetic
aggugaaaugagccacuugu

SEQ ID NO: 821641 - RNA, 20 nt, Artificial Sequence
  Synthetic
auugcccagaccauacuugu

SEQ ID NO: 821642 - RNA, 20 nt, Artificial Sequence
  Synthetic
uaguauggcuagauacuugu

SEQ ID NO: 821643 - RNA, 20 nt, Artificial Sequence
  Synthetic
uaguaaguguauguacuugu

SEQ ID NO: 821644 - RNA, 20 nt, Artificial Sequence
  Synthetic
cucucaacugauuuacuugu

SEQ ID NO: 821645 - RNA, 20 nt, Artificial Sequence
  Synthetic
caaacauuuauuuuacuugu

SEQ ID NO: 821646 - RNA, 20 nt, Artificial Sequence
  Synthetic
ugucuuccguuuuuacuugu

SEQ ID NO: 821647 - RNA, 20 nt, Artificial Sequence
  Synthetic
uuucacaagaaagaccuugu

SEQ ID NO: 821648 - RNA, 20 nt, Artificial Sequence
  Synthetic
ccaagugucagggaccuugu

SEQ ID NO: 821649 - RNA, 20 nt, Artificial Sequence
  Synthetic
agggaagucccuuaccuugu

SEQ ID NO: 821650 - RNA, 20 nt, Artificial Sequence
  Synthetic
uauguguuaccuacccuugu

SEQ ID NO: 821651 - RNA, 20 nt, Artificial Sequence
  Synthetic
cccauuuuggacucccuugu

SEQ ID NO: 821652 - RNA, 20 nt, Artificial Sequence
  Synthetic
auucauccagaaauccuugu

SEQ ID NO: 821653 - RNA, 20 nt, Artificial Sequence
  Synthetic
uaaacauggaacauccuugu

SEQ ID NO: 821654 - RNA, 20 nt, Artificial Sequence
  Synthetic
uucuccuccauccuccuugu

SEQ ID NO: 821655 - RNA, 20 nt, Artificial Sequence
  Synthetic
aauaauacagccuuccuugu

SEQ ID NO: 821656 - RNA, 20 nt, Artificial Sequence
  Synthetic
ugugcucuucucuuccuugu

SEQ ID NO: 821657 - RNA, 20 nt, Artificial Sequence
  Synthetic
acaauuagauaacagcuugu

SEQ ID NO: 821658 - RNA, 20 nt, Artificial Sequence
  Synthetic
cccacucucuucuagcuugu

SEQ ID NO: 821659 - RNA, 20 nt, Artificial Sequence
  Synthetic
cccacucucuucuggcuugu

SEQ ID NO: 821660 - RNA, 20 nt, Artificial Sequence
  Synthetic
caagaaaauuagaugcuugu

SEQ ID NO: 821661 - RNA, 20 nt, Artificial Sequence
  Synthetic
uaucucaguuugcaucuugu

SEQ ID NO: 821662 - RNA, 20 nt, Artificial Sequence
  Synthetic
uauauuuucucucaucuugu

SEQ ID NO: 821663 - RNA, 20 nt, Artificial Sequence
  Synthetic
uuuuugugucuggaucuugu

SEQ ID NO: 821664 - RNA, 20 nt, Artificial Sequence
  Synthetic
uaaauuauuuccacucuugu

SEQ ID NO: 821665 - RNA, 20 nt, Artificial Sequence
  Synthetic
ccauccugccucccucuugu

SEQ ID NO: 821666 - RNA, 20 nt, Artificial Sequence
  Synthetic
cugcucuguaccucucuugu

SEQ ID NO: 821667 - RNA, 20 nt, Artificial Sequence
  Synthetic
uuuauacaaaucucucuugu

SEQ ID NO: 821668 - RNA, 20 nt, Artificial Sequence
  Synthetic
ucuuuccugcuuucucuugu

SEQ ID NO: 821669 - RNA, 20 nt, Artificial Sequence
  Synthetic
uuaacaagaaaaugucuugu

SEQ ID NO: 821670 - RNA, 20 nt, Artificial Sequence
  Synthetic
uucauaacauggugucuugu

SEQ ID NO: 821671 - RNA, 20 nt, Artificial Sequence
  Synthetic
cccuaaaguuugugucuugu

SEQ ID NO: 821672 - RNA, 20 nt, Artificial Sequence
  Synthetic
cuuuuuucuuaccuucuugu

SEQ ID NO: 821673 - RNA, 20 nt, Artificial Sequence
  Synthetic
agccacuuuggccuucuugu

SEQ ID NO: 821674 - RNA, 20 nt, Artificial Sequence
  Synthetic
uguaguaaauaucuucuugu

SEQ ID NO: 821675 - RNA, 20 nt, Artificial Sequence
  Synthetic
acuggauaauuauuucuugu

SEQ ID NO: 821676 - RNA, 20 nt, Artificial Sequence
  Synthetic
cagaauuacaccuuucuugu

SEQ ID NO: 821677 - RNA, 20 nt, Artificial Sequence
  Synthetic
augugccaucuguuucuugu

SEQ ID NO: 821678 - RNA, 20 nt, Artificial Sequence
  Synthetic
uguagucuuccuuuucuugu

SEQ ID NO: 821679 - RNA, 20 nt, Artificial Sequence
  Synthetic
uuaaauaauggugaaguugu

SEQ ID NO: 821680 - RNA, 20 nt, Artificial Sequence
  Synthetic
ugaaguugcaguuaaguugu

SEQ ID NO: 821681 - RNA, 20 nt, Artificial Sequence
  Synthetic
aaaaauguaugcacaguugu

SEQ ID NO: 821682 - RNA, 20 nt, Artificial Sequence
  Synthetic
uccccauaagauacaguugu

SEQ ID NO: 821683 - RNA, 20 nt, Artificial Sequence
  Synthetic
aaauuguuucuuccaguugu

SEQ ID NO: 821684 - RNA, 20 nt, Artificial Sequence
  Synthetic
cuuucuaucugugcaguugu

SEQ ID NO: 821685 - RNA, 20 nt, Artificial Sequence
  Synthetic
aacaucuguuacucaguugu

SEQ ID NO: 821686 - RNA, 20 nt, Artificial Sequence
  Synthetic
uugguugaugggagaguugu

SEQ ID NO: 821687 - RNA, 20 nt, Artificial Sequence
  Synthetic
uuuucuugcuauugaguugu

SEQ ID NO: 821688 - RNA, 20 nt, Artificial Sequence
  Synthetic
acaauuuaucuuugaguugu

SEQ ID NO: 821689 - RNA, 20 nt, Artificial Sequence
  Synthetic
aacuacuaaaauuuaguugu

SEQ ID NO: 821690 - RNA, 20 nt, Artificial Sequence
  Synthetic
uaccuuucaaguuuaguugu

SEQ ID NO: 821691 - RNA, 20 nt, Artificial Sequence
  Synthetic
acaaagaaauuuuuaguugu

SEQ ID NO: 821692 - RNA, 20 nt, Artificial Sequence
  Synthetic
cccacaucccacgagguugu

SEQ ID NO: 821693 - RNA, 20 nt, Artificial Sequence
  Synthetic
cagaaaagcugcaggguugu

SEQ ID NO: 821694 - RNA, 20 nt, Artificial Sequence
  Synthetic
caaaggauucuucggguugu

SEQ ID NO: 821695 - RNA, 20 nt, Artificial Sequence
  Synthetic
ucaggggcgggugggguugu

SEQ ID NO: 821696 - RNA, 20 nt, Artificial Sequence
  Synthetic
ccaauuuucuuuuggguugu

SEQ ID NO: 821697 - RNA, 20 nt, Artificial Sequence
  Synthetic
aaauagccuggcgugguugu

SEQ ID NO: 821698 - RNA, 20 nt, Artificial Sequence
  Synthetic
uaaaugauaaaguugguugu

SEQ ID NO: 821699 - RNA, 20 nt, Artificial Sequence
  Synthetic
uugacaugucuuaauguugu

SEQ ID NO: 821700 - RNA, 20 nt, Artificial Sequence
  Synthetic
cugcggcuaauacauguugu

SEQ ID NO: 821701 - RNA, 20 nt, Artificial Sequence
  Synthetic
cuugaauuccuacauguugu

SEQ ID NO: 821702 - RNA, 20 nt, Artificial Sequence
  Synthetic
aaaauuuucucccauguugu

SEQ ID NO: 821703 - RNA, 20 nt, Artificial Sequence
  Synthetic
cucccuaagagagauguugu

SEQ ID NO: 821704 - RNA, 20 nt, Artificial Sequence
  Synthetic
cacacccugggaacuguugu

SEQ ID NO: 821705 - RNA, 20 nt, Artificial Sequence
  Synthetic
cacacucuggggacuguugu

SEQ ID NO: 821706 - RNA, 20 nt, Artificial Sequence
  Synthetic
uguauaaauuugacuguugu

SEQ ID NO: 821707 - RNA, 20 nt, Artificial Sequence
  Synthetic
cuuccaaacucaccuguugu

SEQ ID NO: 821708 - RNA, 20 nt, Artificial Sequence
  Synthetic
cacacaccagggccuguugu

SEQ ID NO: 821709 - RNA, 20 nt, Artificial Sequence
  Synthetic
cacacaccggggccuguugu

SEQ ID NO: 821710 - RNA, 20 nt, Artificial Sequence
  Synthetic
aucaagccagcugcuguugu

SEQ ID NO: 821711 - RNA, 20 nt, Artificial Sequence
  Synthetic
ccauacuauuuuucuguugu

SEQ ID NO: 821712 - RNA, 20 nt, Artificial Sequence
  Synthetic
uuaggauauuacaguguugu

SEQ ID NO: 821713 - RNA, 20 nt, Artificial Sequence
  Synthetic
caauaauccccacguguugu

SEQ ID NO: 821714 - RNA, 20 nt, Artificial Sequence
  Synthetic
cuguaauucccauguguugu

SEQ ID NO: 821715 - RNA, 20 nt, Artificial Sequence
  Synthetic
ccauaauuccuacuuguugu

SEQ ID NO: 821716 - RNA, 20 nt, Artificial Sequence
  Synthetic
aagaaaugguuuguuguugu

SEQ ID NO: 821717 - RNA, 20 nt, Artificial Sequence
  Synthetic
uggcauucauccuuuguugu

SEQ ID NO: 821718 - RNA, 20 nt, Artificial Sequence
  Synthetic
accaaauaauucuuuguugu

SEQ ID NO: 821719 - RNA, 20 nt, Artificial Sequence
  Synthetic
aguggaggaagguuuguugu

SEQ ID NO: 821720 - RNA, 20 nt, Artificial Sequence
  Synthetic
uucuagccuggaaaauuugu

SEQ ID NO: 821721 - RNA, 20 nt, Artificial Sequence
  Synthetic
aauuuaauuaacaaauuugu

SEQ ID NO: 821722 - RNA, 20 nt, Artificial Sequence
  Synthetic
aaauaauucagcaaauuugu

SEQ ID NO: 821723 - RNA, 20 nt, Artificial Sequence
  Synthetic
ucuauuuucuucaaauuugu

SEQ ID NO: 821724 - RNA, 20 nt, Artificial Sequence
  Synthetic
cucauaagugugaaauuugu

SEQ ID NO: 821725 - RNA, 20 nt, Artificial Sequence
  Synthetic
acaaagcacuauaaauuugu

SEQ ID NO: 821726 - RNA, 20 nt, Artificial Sequence
  Synthetic
uuuuuuucuuguaaauuugu

SEQ ID NO: 821727 - RNA, 20 nt, Artificial Sequence
  Synthetic
cacuagaaauuuaaauuugu

SEQ ID NO: 821728 - RNA, 20 nt, Artificial Sequence
  Synthetic
aaauaggacuaacaauuugu

SEQ ID NO: 821729 - RNA, 20 nt, Artificial Sequence
  Synthetic
cucuagauuuuucaauuugu

SEQ ID NO: 821730 - RNA, 20 nt, Artificial Sequence
  Synthetic
agacaaacauuugaauuugu

SEQ ID NO: 821731 - RNA, 20 nt, Artificial Sequence
  Synthetic
augaauggaugauaauuugu

SEQ ID NO: 821732 - RNA, 20 nt, Artificial Sequence
  Synthetic
ucuugaguucacuaauuugu

SEQ ID NO: 821733 - RNA, 20 nt, Artificial Sequence
  Synthetic
aauauucgcuuuuaauuugu

SEQ ID NO: 821734 - RNA, 20 nt, Artificial Sequence
  Synthetic
uucaucgcagccacauuugu

SEQ ID NO: 821735 - RNA, 20 nt, Artificial Sequence
  Synthetic
uucuguggguagacauuugu

SEQ ID NO: 821736 - RNA, 20 nt, Artificial Sequence
  Synthetic
ccagagacauguacauuugu

SEQ ID NO: 821737 - RNA, 20 nt, Artificial Sequence
  Synthetic
aucaaauuugaugcauuugu

SEQ ID NO: 821738 - RNA, 20 nt, Artificial Sequence
  Synthetic
acacaacuguauucauuugu

SEQ ID NO: 821739 - RNA, 20 nt, Artificial Sequence
  Synthetic
aagucuuagcuuucauuugu

SEQ ID NO: 821740 - RNA, 20 nt, Artificial Sequence
  Synthetic
uucuuuucugaaagauuugu

SEQ ID NO: 821741 - RNA, 20 nt, Artificial Sequence
  Synthetic
agcaaauaaaggagauuugu

SEQ ID NO: 821742 - RNA, 20 nt, Artificial Sequence
  Synthetic
uucaccugcuggagauuugu

SEQ ID NO: 821743 - RNA, 20 nt, Artificial Sequence
  Synthetic
ucuaauagcaauagauuugu

SEQ ID NO: 821744 - RNA, 20 nt, Artificial Sequence
  Synthetic
cuauuguuugauagauuugu

SEQ ID NO: 821745 - RNA, 20 nt, Artificial Sequence
  Synthetic
uauaaugaacagggauuugu

SEQ ID NO: 821746 - RNA, 20 nt, Artificial Sequence
  Synthetic
auauguggauguggauuugu

SEQ ID NO: 821747 - RNA, 20 nt, Artificial Sequence
  Synthetic
uugcucccuuguggauuugu

SEQ ID NO: 821748 - RNA, 20 nt, Artificial Sequence
  Synthetic
uuuccaacuaauugauuugu

SEQ ID NO: 821749 - RNA, 20 nt, Artificial Sequence
  Synthetic
auguuaucaaaaauauuugu

SEQ ID NO: 821750 - RNA, 20 nt, Artificial Sequence
  Synthetic
agcaauugauaaauauuugu

SEQ ID NO: 821751 - RNA, 20 nt, Artificial Sequence
  Synthetic
acccuaaauuaaauauuugu

SEQ ID NO: 821752 - RNA, 20 nt, Artificial Sequence
  Synthetic
auccucauugcaauauuugu

SEQ ID NO: 821753 - RNA, 20 nt, Artificial Sequence
  Synthetic
uaauaauuguacauauuugu

SEQ ID NO: 821754 - RNA, 20 nt, Artificial Sequence
  Synthetic
agauaaagcaccauauuugu

SEQ ID NO: 821755 - RNA, 20 nt, Artificial Sequence
  Synthetic
uaguauguauauauauuugu

SEQ ID NO: 821756 - RNA, 20 nt, Artificial Sequence
  Synthetic
ucguaggaguauauauuugu

SEQ ID NO: 821757 - RNA, 20 nt, Artificial Sequence
  Synthetic
aagauuucuaaacuauuugu

SEQ ID NO: 821758 - RNA, 20 nt, Artificial Sequence
  Synthetic
cuggaauccuugcuauuugu

SEQ ID NO: 821759 - RNA, 20 nt, Artificial Sequence
  Synthetic
cuuuaagagaagguauuugu

SEQ ID NO: 821760 - RNA, 20 nt, Artificial Sequence
  Synthetic
cccuuguaaguuguauuugu

SEQ ID NO: 821761 - RNA, 20 nt, Artificial Sequence
  Synthetic
caaaucuuauauuuauuugu

SEQ ID NO: 821762 - RNA, 20 nt, Artificial Sequence
  Synthetic
caacccucuccuuuauuugu

SEQ ID NO: 821763 - RNA, 20 nt, Artificial Sequence
  Synthetic
uaugagauggcaaacuuugu

SEQ ID NO: 821764 - RNA, 20 nt, Artificial Sequence
  Synthetic
uuaacauuuggaaacuuugu

SEQ ID NO: 821765 - RNA, 20 nt, Artificial Sequence
  Synthetic
uuuugucacucuaacuuugu

SEQ ID NO: 821766 - RNA, 20 nt, Artificial Sequence
  Synthetic
uucucuagcuuuaacuuugu

SEQ ID NO: 821767 - RNA, 20 nt, Artificial Sequence
  Synthetic
agaaaaggaaaauacuuugu

SEQ ID NO: 821768 - RNA, 20 nt, Artificial Sequence
  Synthetic
agagugguguugaccuuugu

SEQ ID NO: 821769 - RNA, 20 nt, Artificial Sequence
  Synthetic
ucugaugggcuucccuuugu

SEQ ID NO: 821770 - RNA, 20 nt, Artificial Sequence
  Synthetic
ccuaugucuuccuccuuugu

SEQ ID NO: 821771 - RNA, 20 nt, Artificial Sequence
  Synthetic
cauuuauauaucuccuuugu

SEQ ID NO: 821772 - RNA, 20 nt, Artificial Sequence
  Synthetic
caccuaacucauagcuuugu

SEQ ID NO: 821773 - RNA, 20 nt, Artificial Sequence
  Synthetic
acaaauauuucaggcuuugu

SEQ ID NO: 821774 - RNA, 20 nt, Artificial Sequence
  Synthetic
cuaaaugccuuuggcuuugu

SEQ ID NO: 821775 - RNA, 20 nt, Artificial Sequence
  Synthetic
uuugcuuaaagcugcuuugu

SEQ ID NO: 821776 - RNA, 20 nt, Artificial Sequence
  Synthetic
aaugugauuucuugcuuugu

SEQ ID NO: 821777 - RNA, 20 nt, Artificial Sequence
  Synthetic
aaguaaaauaacaucuuugu

SEQ ID NO: 821778 - RNA, 20 nt, Artificial Sequence
  Synthetic
ucuccuaauugcaucuuugu

SEQ ID NO: 821779 - RNA, 20 nt, Artificial Sequence
  Synthetic
cuuaaagugaucaucuuugu

SEQ ID NO: 821780 - RNA, 20 nt, Artificial Sequence
  Synthetic
uugucuuucuugaucuuugu

SEQ ID NO: 821781 - RNA, 20 nt, Artificial Sequence
  Synthetic
uugucucuuuugaucuuugu

SEQ ID NO: 821782 - RNA, 20 nt, Artificial Sequence
  Synthetic
auauguuucuuccucuuugu

SEQ ID NO: 821783 - RNA, 20 nt, Artificial Sequence
  Synthetic
aggaguguaagucucuuugu

SEQ ID NO: 821784 - RNA, 20 nt, Artificial Sequence
  Synthetic
uuuuaguauucugucuuugu

SEQ ID NO: 821785 - RNA, 20 nt, Artificial Sequence
  Synthetic
uuagauaaaacuuucuuugu

SEQ ID NO: 821786 - RNA, 20 nt, Artificial Sequence
  Synthetic
uuuccuugcucuaaguuugu

SEQ ID NO: 821787 - RNA, 20 nt, Artificial Sequence
  Synthetic
auuauuugccuacaguuugu

SEQ ID NO: 821788 - RNA, 20 nt, Artificial Sequence
  Synthetic
uuauuuagugaagaguuugu

SEQ ID NO: 821789 - RNA, 20 nt, Artificial Sequence
  Synthetic
auguuauuuuuaacguuugu

SEQ ID NO: 821790 - RNA, 20 nt, Artificial Sequence
  Synthetic
aacuuuuauuuuagguuugu

SEQ ID NO: 821791 - RNA, 20 nt, Artificial Sequence
  Synthetic
ccuaguuucugaugguuugu

SEQ ID NO: 821792 - RNA, 20 nt, Artificial Sequence
  Synthetic
cuggacuuuuuuugguuugu

SEQ ID NO: 821793 - RNA, 20 nt, Artificial Sequence
  Synthetic
aaugucuacuacauguuugu

SEQ ID NO: 821794 - RNA, 20 nt, Artificial Sequence
  Synthetic
uuuuugaaaaacaauuuugu

SEQ ID NO: 821795 - RNA, 20 nt, Artificial Sequence
  Synthetic
caaauaaauguacauuuugu

SEQ ID NO: 821796 - RNA, 20 nt, Artificial Sequence
  Synthetic
aaaauuuucucccauuuugu

SEQ ID NO: 821797 - RNA, 20 nt, Artificial Sequence
  Synthetic
uaauuccuauuucauuuugu

SEQ ID NO: 821798 - RNA, 20 nt, Artificial Sequence
  Synthetic
caguuccauugagauuuugu

SEQ ID NO: 821799 - RNA, 20 nt, Artificial Sequence
  Synthetic
ugaaaacagcuggauuuugu

SEQ ID NO: 821800 - RNA, 20 nt, Artificial Sequence
  Synthetic
caaugauaucagacuuuugu

SEQ ID NO: 821801 - RNA, 20 nt, Artificial Sequence
  Synthetic
ucuugucauacuacuuuugu

SEQ ID NO: 821802 - RNA, 20 nt, Artificial Sequence
  Synthetic
ccauuuuucguaccuuuugu

SEQ ID NO: 821803 - RNA, 20 nt, Artificial Sequence
  Synthetic
uauucaggaaagccuuuugu

SEQ ID NO: 821804 - RNA, 20 nt, Artificial Sequence
  Synthetic
uuuugauguuuuccuuuugu

SEQ ID NO: 821805 - RNA, 20 nt, Artificial Sequence
  Synthetic
auucaaauguuagcuuuugu

SEQ ID NO: 821806 - RNA, 20 nt, Artificial Sequence
  Synthetic
acaucagacuacaguuuugu

SEQ ID NO: 821807 - RNA, 20 nt, Artificial Sequence
  Synthetic
caugguggcgaugguuuugu

SEQ ID NO: 821808 - RNA, 20 nt, Artificial Sequence
  Synthetic
aacacugucauauguuuugu

SEQ ID NO: 821809 - RNA, 20 nt, Artificial Sequence
  Synthetic
auuauaaaugauuguuuugu

SEQ ID NO: 821810 - RNA, 20 nt, Artificial Sequence
  Synthetic
aaauuuuuuuaaauuuuugu

SEQ ID NO: 821811 - RNA, 20 nt, Artificial Sequence
  Synthetic
uuuuuuauuuuaauuuuugu

SEQ ID NO: 821812 - RNA, 20 nt, Artificial Sequence
  Synthetic
uuuuaauuuuuaauuuuugu

SEQ ID NO: 821813 - RNA, 20 nt, Artificial Sequence
  Synthetic
uuauuguuuuuaauuuuugu

SEQ ID NO: 821814 - RNA, 20 nt, Artificial Sequence
  Synthetic
auaucucaguccauuuuugu

SEQ ID NO: 821815 - RNA, 20 nt, Artificial Sequence
  Synthetic
aucaagauuaugauuuuugu

SEQ ID NO: 821816 - RNA, 20 nt, Artificial Sequence
  Synthetic
aagagaaauccccuuuuugu

SEQ ID NO: 821817 - RNA, 20 nt, Artificial Sequence
  Synthetic
aacuauuucucucuuuuugu

SEQ ID NO: 821818 - RNA, 20 nt, Artificial Sequence
  Synthetic
uuauuguuaagaguuuuugu

SEQ ID NO: 821819 - RNA, 20 nt, Artificial Sequence
  Synthetic
uucaauuuuguaguuuuugu

SEQ ID NO: 821820 - RNA, 20 nt, Artificial Sequence
  Synthetic
aauaggucuuuuguuuuugu

SEQ ID NO: 821821 - RNA, 20 nt, Artificial Sequence
  Synthetic
uuaucuaguuuuguuuuugu

SEQ ID NO: 821822 - RNA, 20 nt, Artificial Sequence
  Synthetic
uacuuuuuauuauuuuuugu

SEQ ID NO: 821823 - RNA, 20 nt, Artificial Sequence
  Synthetic
agggaauuuaguuuuuuugu

SEQ ID NO: 821824 - RNA, 20 nt, Artificial Sequence
  Synthetic
cuggaccuggguuuuuuugu

SEQ ID NO: 821825 - RNA, 20 nt, Artificial Sequence
  Synthetic
uuucaaaaaaaaaaaaaauu

SEQ ID NO: 821826 - RNA, 20 nt, Artificial Sequence
  Synthetic
aaaaaagaaaaaaaaaaauu

SEQ ID NO: 821827 - RNA, 20 nt, Artificial Sequence
  Synthetic
aaaggaacagaaaaaaaauu

SEQ ID NO: 821828 - RNA, 20 nt, Artificial Sequence
  Synthetic
uaaaaaagagaaaaaaaauu

SEQ ID NO: 821829 - RNA, 20 nt, Artificial Sequence
  Synthetic
ucuaauuauacaaaaaaauu

SEQ ID NO: 821830 - RNA, 20 nt, Artificial Sequence
  Synthetic
uuauaugaaacuaaaaaauu

SEQ ID NO: 821831 - RNA, 20 nt, Artificial Sequence
  Synthetic
auauuuaauuguaaaaaauu

SEQ ID NO: 821832 - RNA, 20 nt, Artificial Sequence
  Synthetic
aaugaauuccuuaaaaaauu

SEQ ID NO: 821833 - RNA, 20 nt, Artificial Sequence
  Synthetic
ugguuuugguuuaaaaaauu

SEQ ID NO: 821834 - RNA, 20 nt, Artificial Sequence
  Synthetic
ucauaacuuuuuaaaaaauu

SEQ ID NO: 821835 - RNA, 20 nt, Artificial Sequence
  Synthetic
caucuauacagacaaaaauu

SEQ ID NO: 821836 - RNA, 20 nt, Artificial Sequence
  Synthetic
aguggaaaagcccaaaaauu

SEQ ID NO: 821837 - RNA, 20 nt, Artificial Sequence
  Synthetic
aaaaaaccuaaucaaaaauu

SEQ ID NO: 821838 - RNA, 20 nt, Artificial Sequence
  Synthetic
aguggcaauugucaaaaauu

SEQ ID NO: 821839 - RNA, 20 nt, Artificial Sequence
  Synthetic
auauuauaaauagaaaaauu

SEQ ID NO: 821840 - RNA, 20 nt, Artificial Sequence
  Synthetic
aggcaagauaaugaaaaauu

SEQ ID NO: 821841 - RNA, 20 nt, Artificial Sequence
  Synthetic
uguuugaugugugaaaaauu

SEQ ID NO: 821842 - RNA, 20 nt, Artificial Sequence
  Synthetic
uauacauaaaaauaaaaauu

SEQ ID NO: 821843 - RNA, 20 nt, Artificial Sequence
  Synthetic
aagcacaacaaauaaaaauu

SEQ ID NO: 821844 - RNA, 20 nt, Artificial Sequence
  Synthetic
agguacuaacaauaaaaauu

SEQ ID NO: 821845 - RNA, 20 nt, Artificial Sequence
  Synthetic
aauuauuaaguauaaaaauu

SEQ ID NO: 821846 - RNA, 20 nt, Artificial Sequence
  Synthetic
aguaagaaguuauaaaaauu

SEQ ID NO: 821847 - RNA, 20 nt, Artificial Sequence
  Synthetic
uacuaaauucauuaaaaauu

SEQ ID NO: 821848 - RNA, 20 nt, Artificial Sequence
  Synthetic
cuuuguucacuuuaaaaauu

SEQ ID NO: 821849 - RNA, 20 nt, Artificial Sequence
  Synthetic
cuugaggucaacacaaaauu

SEQ ID NO: 821850 - RNA, 20 nt, Artificial Sequence
  Synthetic
uggguuucaagcacaaaauu

SEQ ID NO: 821851 - RNA, 20 nt, Artificial Sequence
  Synthetic
uaucauauaaagacaaaauu

SEQ ID NO: 821852 - RNA, 20 nt, Artificial Sequence
  Synthetic
ucucuguuuuuuacaaaauu

SEQ ID NO: 821853 - RNA, 20 nt, Artificial Sequence
  Synthetic
ugccuuguuugagcaaaauu

SEQ ID NO: 821854 - RNA, 20 nt, Artificial Sequence
  Synthetic
aucaagaacuuggcaaaauu

SEQ ID NO: 821855 - RNA, 20 nt, Artificial Sequence
  Synthetic
uaucuuuaggaugcaaaauu

SEQ ID NO: 821856 - RNA, 20 nt, Artificial Sequence
  Synthetic
uccaucuccagugcaaaauu

SEQ ID NO: 821857 - RNA, 20 nt, Artificial Sequence
  Synthetic
auggaauaugaaucaaaauu

SEQ ID NO: 821858 - RNA, 20 nt, Artificial Sequence
  Synthetic
agagugagcagaucaaaauu

SEQ ID NO: 821859 - RNA, 20 nt, Artificial Sequence
  Synthetic
acuacagaaugaucaaaauu

SEQ ID NO: 821860 - RNA, 20 nt, Artificial Sequence
  Synthetic
ccucccaaagucucaaaauu

SEQ ID NO: 821861 - RNA, 20 nt, Artificial Sequence
  Synthetic
auaccaaaauagucaaaauu

SEQ ID NO: 821862 - RNA, 20 nt, Artificial Sequence
  Synthetic
auauauacauuaagaaaauu

SEQ ID NO: 821863 - RNA, 20 nt, Artificial Sequence
  Synthetic
auuuaaauuuggagaaaauu

SEQ ID NO: 821864 - RNA, 20 nt, Artificial Sequence
  Synthetic
cuaagacaaugaggaaaauu

SEQ ID NO: 821865 - RNA, 20 nt, Artificial Sequence
  Synthetic
aaacaauccaacggaaaauu

SEQ ID NO: 821866 - RNA, 20 nt, Artificial Sequence
  Synthetic
aaacacugacagggaaaauu

SEQ ID NO: 821867 - RNA, 20 nt, Artificial Sequence
  Synthetic
agaaaaucugagggaaaauu

SEQ ID NO: 821868 - RNA, 20 nt, Artificial Sequence
  Synthetic
aagucaaugagaugaaaauu

SEQ ID NO: 821869 - RNA, 20 nt, Artificial Sequence
  Synthetic
ugauguagagggugaaaauu

SEQ ID NO: 821870 - RNA, 20 nt, Artificial Sequence
  Synthetic
aaaucugaagugugaaaauu

SEQ ID NO: 821871 - RNA, 20 nt, Artificial Sequence
  Synthetic
cucauuuugagaauaaaauu

SEQ ID NO: 821872 - RNA, 20 nt, Artificial Sequence
  Synthetic
aacaggacaaauauaaaauu

SEQ ID NO: 821873 - RNA, 20 nt, Artificial Sequence
  Synthetic
uccuaagauccuauaaaauu

SEQ ID NO: 821874 - RNA, 20 nt, Artificial Sequence
  Synthetic
uuuccuucauguauaaaauu

SEQ ID NO: 821875 - RNA, 20 nt, Artificial Sequence
  Synthetic
auugaaaaaauuauaaaauu

SEQ ID NO: 821876 - RNA, 20 nt, Artificial Sequence
  Synthetic
aagcuuauaauccuaaaauu

SEQ ID NO: 821877 - RNA, 20 nt, Artificial Sequence
  Synthetic
caaauaaaauagcuaaaauu

SEQ ID NO: 821878 - RNA, 20 nt, Artificial Sequence
  Synthetic
auugaaagauggcuaaaauu

SEQ ID NO: 821879 - RNA, 20 nt, Artificial Sequence
  Synthetic
agaggauacacucuaaaauu

SEQ ID NO: 821880 - RNA, 20 nt, Artificial Sequence
  Synthetic
cugaugcuuucaguaaaauu

SEQ ID NO: 821881 - RNA, 20 nt, Artificial Sequence
  Synthetic
uuguauagaagaguaaaauu

SEQ ID NO: 821882 - RNA, 20 nt, Artificial Sequence
  Synthetic
uaacaggagccauuaaaauu

SEQ ID NO: 821883 - RNA, 20 nt, Artificial Sequence
  Synthetic
ucuaauauguuauuaaaauu

SEQ ID NO: 821884 - RNA, 20 nt, Artificial Sequence
  Synthetic
ugaagagauauguuaaaauu

SEQ ID NO: 821885 - RNA, 20 nt, Artificial Sequence
  Synthetic
cugaggugucuguuaaaauu

SEQ ID NO: 821886 - RNA, 20 nt, Artificial Sequence
  Synthetic
augcaaaucacaaacaaauu

SEQ ID NO: 821887 - RNA, 20 nt, Artificial Sequence
  Synthetic
caugauaaacaacacaaauu

SEQ ID NO: 821888 - RNA, 20 nt, Artificial Sequence
  Synthetic
uuuuuuuaaugucacaaauu

SEQ ID NO: 821889 - RNA, 20 nt, Artificial Sequence
  Synthetic
uucaaagaagucaccaaauu

SEQ ID NO: 821890 - RNA, 20 nt, Artificial Sequence
  Synthetic
uaauuuuauuucaccaaauu

SEQ ID NO: 821891 - RNA, 20 nt, Artificial Sequence
  Synthetic
ccucuuaagccuaccaaauu

SEQ ID NO: 821892 - RNA, 20 nt, Artificial Sequence
  Synthetic
aaauguucuuaaagcaaauu

SEQ ID NO: 821893 - RNA, 20 nt, Artificial Sequence
  Synthetic
augaaaacugguagcaaauu

SEQ ID NO: 821894 - RNA, 20 nt, Artificial Sequence
  Synthetic
agaaaaacucuuagcaaauu

SEQ ID NO: 821895 - RNA, 20 nt, Artificial Sequence
  Synthetic
uggcagccaguaugcaaauu

SEQ ID NO: 821896 - RNA, 20 nt, Artificial Sequence
  Synthetic
uauacuuauguaugcaaauu

SEQ ID NO: 821897 - RNA, 20 nt, Artificial Sequence
  Synthetic
uugcugaagaagugcaaauu

SEQ ID NO: 821898 - RNA, 20 nt, Artificial Sequence
  Synthetic
agaaugucaucuaucaaauu

SEQ ID NO: 821899 - RNA, 20 nt, Artificial Sequence
  Synthetic
aaauugcuauaacucaaauu

SEQ ID NO: 821900 - RNA, 20 nt, Artificial Sequence
  Synthetic
auaaagguuugucucaaauu

SEQ ID NO: 821901 - RNA, 20 nt, Artificial Sequence
  Synthetic
ccuucaagucuggucaaauu

SEQ ID NO: 821902 - RNA, 20 nt, Artificial Sequence
  Synthetic
acaaaggugugguucaaauu

SEQ ID NO: 821903 - RNA, 20 nt, Artificial Sequence
  Synthetic
uauccugacucuaagaaauu

SEQ ID NO: 821904 - RNA, 20 nt, Artificial Sequence
  Synthetic
uggaaacugaguaagaaauu

SEQ ID NO: 821905 - RNA, 20 nt, Artificial Sequence
  Synthetic
uggaaaacaauuaagaaauu

SEQ ID NO: 821906 - RNA, 20 nt, Artificial Sequence
  Synthetic
cagccagaauuucagaaauu

SEQ ID NO: 821907 - RNA, 20 nt, Artificial Sequence
  Synthetic
acuuuacgcacagagaaauu

SEQ ID NO: 821908 - RNA, 20 nt, Artificial Sequence
  Synthetic
aagggccugauggagaaauu

SEQ ID NO: 821909 - RNA, 20 nt, Artificial Sequence
  Synthetic
cguguguuuaacuagaaauu

SEQ ID NO: 821910 - RNA, 20 nt, Artificial Sequence
  Synthetic
uugcaguuaccaaggaaauu

SEQ ID NO: 821911 - RNA, 20 nt, Artificial Sequence
  Synthetic
aacuauggcuuuaggaaauu

SEQ ID NO: 821912 - RNA, 20 nt, Artificial Sequence
  Synthetic
aaguucaggccagggaaauu

SEQ ID NO: 821913 - RNA, 20 nt, Artificial Sequence
  Synthetic
agauguaauaaaaugaaauu

SEQ ID NO: 821914 - RNA, 20 nt, Artificial Sequence
  Synthetic
acaugaaaaauaaugaaauu

SEQ ID NO: 821915 - RNA, 20 nt, Artificial Sequence
  Synthetic
aguuuccaacacaugaaauu

SEQ ID NO: 821916 - RNA, 20 nt, Artificial Sequence
  Synthetic
cuuggaguuaccaugaaauu

SEQ ID NO: 821917 - RNA, 20 nt, Artificial Sequence
  Synthetic
uucaucucuuagaugaaauu

SEQ ID NO: 821918 - RNA, 20 nt, Artificial Sequence
  Synthetic
cucagauaagggcugaaauu

SEQ ID NO: 821919 - RNA, 20 nt, Artificial Sequence
  Synthetic
agguuagcugcucugaaauu

SEQ ID NO: 821920 - RNA, 20 nt, Artificial Sequence
  Synthetic
uaaaaaagaguagugaaauu

SEQ ID NO: 821921 - RNA, 20 nt, Artificial Sequence
  Synthetic
ccagggaaggaauugaaauu

SEQ ID NO: 821922 - RNA, 20 nt, Artificial Sequence
  Synthetic
ccugacacuugauugaaauu

SEQ ID NO: 821923 - RNA, 20 nt, Artificial Sequence
  Synthetic
caggucuuuuauuugaaauu

SEQ ID NO: 821924 - RNA, 20 nt, Artificial Sequence
  Synthetic
cuggccuuguaaaauaaauu

SEQ ID NO: 821925 - RNA, 20 nt, Artificial Sequence
  Synthetic
ugugaccuuucaaauaaauu

SEQ ID NO: 821926 - RNA, 20 nt, Artificial Sequence
  Synthetic
cuaaaaacucucaauaaauu

SEQ ID NO: 821927 - RNA, 20 nt, Artificial Sequence
  Synthetic
aaauuguaagauaauaaauu

SEQ ID NO: 821928 - RNA, 20 nt, Artificial Sequence
  Synthetic
aaauguaauuggcauaaauu

SEQ ID NO: 821929 - RNA, 20 nt, Artificial Sequence
  Synthetic
acuuauaugagagauaaauu

SEQ ID NO: 821930 - RNA, 20 nt, Artificial Sequence
  Synthetic
cuaaaaacucucgauaaauu

SEQ ID NO: 821931 - RNA, 20 nt, Artificial Sequence
  Synthetic
auuucugcaggggauaaauu

SEQ ID NO: 821932 - RNA, 20 nt, Artificial Sequence
  Synthetic
cagaaugguggugauaaauu

SEQ ID NO: 821933 - RNA, 20 nt, Artificial Sequence
  Synthetic
uuuuuaaaaugugauaaauu

SEQ ID NO: 821934 - RNA, 20 nt, Artificial Sequence
  Synthetic
auguacccaaacuauaaauu

SEQ ID NO: 821935 - RNA, 20 nt, Artificial Sequence
  Synthetic
aguuaucuauccuauaaauu

SEQ ID NO: 821936 - RNA, 20 nt, Artificial Sequence
  Synthetic
acucuauuguucuauaaauu

SEQ ID NO: 821937 - RNA, 20 nt, Artificial Sequence
  Synthetic
uccagucuuaguuauaaauu

SEQ ID NO: 821938 - RNA, 20 nt, Artificial Sequence
  Synthetic
uaaauuuuaauuuauaaauu

SEQ ID NO: 821939 - RNA, 20 nt, Artificial Sequence
  Synthetic
auguguagauggccuaaauu

SEQ ID NO: 821940 - RNA, 20 nt, Artificial Sequence
  Synthetic
uuaccuuuauaugcuaaauu

SEQ ID NO: 821941 - RNA, 20 nt, Artificial Sequence
  Synthetic
aauauaaaaagaaguaaauu

SEQ ID NO: 821942 - RNA, 20 nt, Artificial Sequence
  Synthetic
augccucucacuaguaaauu

SEQ ID NO: 821943 - RNA, 20 nt, Artificial Sequence
  Synthetic
augggaacauguaguaaauu

SEQ ID NO: 821944 - RNA, 20 nt, Artificial Sequence
  Synthetic
aucaguaacagauguaaauu

SEQ ID NO: 821945 - RNA, 20 nt, Artificial Sequence
  Synthetic
aaaaauuaaugcuguaaauu

SEQ ID NO: 821946 - RNA, 20 nt, Artificial Sequence
  Synthetic
aguuugcugcuuuguaaauu

SEQ ID NO: 821947 - RNA, 20 nt, Artificial Sequence
  Synthetic
cuguuaaauuaaauuaaauu

SEQ ID NO: 821948 - RNA, 20 nt, Artificial Sequence
  Synthetic
agaugaguagcaauuaaauu

SEQ ID NO: 821949 - RNA, 20 nt, Artificial Sequence
  Synthetic
aacucauauugcauuaaauu

SEQ ID NO: 821950 - RNA, 20 nt, Artificial Sequence
  Synthetic
aaggcuuuuuuucuuaaauu

SEQ ID NO: 821951 - RNA, 20 nt, Artificial Sequence
  Synthetic
uuuuauccauauguuaaauu

SEQ ID NO: 821952 - RNA, 20 nt, Artificial Sequence
  Synthetic
aaauaauggaaauuuaaauu

SEQ ID NO: 821953 - RNA, 20 nt, Artificial Sequence
  Synthetic
aggacuucaacauuuaaauu

SEQ ID NO: 821954 - RNA, 20 nt, Artificial Sequence
  Synthetic
caaacuuagacauuuaaauu

SEQ ID NO: 821955 - RNA, 20 nt, Artificial Sequence
  Synthetic
ugcauccucauauuuaaauu

SEQ ID NO: 821956 - RNA, 20 nt, Artificial Sequence
  Synthetic
cauccauaauuauuuaaauu

SEQ ID NO: 821957 - RNA, 20 nt, Artificial Sequence
  Synthetic
uauuuuauaacuuuuaaauu

SEQ ID NO: 821958 - RNA, 20 nt, Artificial Sequence
  Synthetic
uugacaagggaaaaacaauu

SEQ ID NO: 821959 - RNA, 20 nt, Artificial Sequence
  Synthetic
ucuugggauuugaaacaauu

SEQ ID NO: 821960 - RNA, 20 nt, Artificial Sequence
  Synthetic
uugaaaaucacuaaacaauu

SEQ ID NO: 821961 - RNA, 20 nt, Artificial Sequence
  Synthetic
agguugaagugacaacaauu

SEQ ID NO: 821962 - RNA, 20 nt, Artificial Sequence
  Synthetic
ccugcagcugcagaacaauu

SEQ ID NO: 821963 - RNA, 20 nt, Artificial Sequence
  Synthetic
aaguuguccacugaacaauu

SEQ ID NO: 821964 - RNA, 20 nt, Artificial Sequence
  Synthetic
agcguaaucuuugaacaauu

SEQ ID NO: 821965 - RNA, 20 nt, Artificial Sequence
  Synthetic
uaaccgaaaaauacacaauu

SEQ ID NO: 821966 - RNA, 20 nt, Artificial Sequence
  Synthetic
auaaaaauauuuagacaauu

SEQ ID NO: 821967 - RNA, 20 nt, Artificial Sequence
  Synthetic
cguuaucuauuaggacaauu

SEQ ID NO: 821968 - RNA, 20 nt, Artificial Sequence
  Synthetic
cuagucucucaaauacaauu

SEQ ID NO: 821969 - RNA, 20 nt, Artificial Sequence
  Synthetic
augaauguauugauacaauu

SEQ ID NO: 821970 - RNA, 20 nt, Artificial Sequence
  Synthetic
ucuuuuacuuaacuacaauu

SEQ ID NO: 821971 - RNA, 20 nt, Artificial Sequence
  Synthetic
cgaaucucaaugcuacaauu

SEQ ID NO: 821972 - RNA, 20 nt, Artificial Sequence
  Synthetic
auaauuguuuuucuacaauu

SEQ ID NO: 821973 - RNA, 20 nt, Artificial Sequence
  Synthetic
aauguuauauauuuacaauu

SEQ ID NO: 821974 - RNA, 20 nt, Artificial Sequence
  Synthetic
cagcagguuauaaaccaauu

SEQ ID NO: 821975 - RNA, 20 nt, Artificial Sequence
  Synthetic
uaugccaagccuaaccaauu

SEQ ID NO: 821976 - RNA, 20 nt, Artificial Sequence
  Synthetic
aguuuuuuaguaagccaauu

SEQ ID NO: 821977 - RNA, 20 nt, Artificial Sequence
  Synthetic
auuaacuuucuaauccaauu

SEQ ID NO: 821978 - RNA, 20 nt, Artificial Sequence
  Synthetic
agagcagauauucuccaauu

SEQ ID NO: 821979 - RNA, 20 nt, Artificial Sequence
  Synthetic
aggauaucacuucuccaauu

SEQ ID NO: 821980 - RNA, 20 nt, Artificial Sequence
  Synthetic
uaucaccacacauuccaauu

SEQ ID NO: 821981 - RNA, 20 nt, Artificial Sequence
  Synthetic
caggucaauauguuccaauu

SEQ ID NO: 821982 - RNA, 20 nt, Artificial Sequence
  Synthetic
accuauuuaguguuccaauu

SEQ ID NO: 821983 - RNA, 20 nt, Artificial Sequence
  Synthetic
aacugaauaauuuuccaauu

SEQ ID NO: 821984 - RNA, 20 nt, Artificial Sequence
  Synthetic
cgacuguaaucccagcaauu

SEQ ID NO: 821985 - RNA, 20 nt, Artificial Sequence
  Synthetic
cgccuguaauaucagcaauu

SEQ ID NO: 821986 - RNA, 20 nt, Artificial Sequence
  Synthetic
acagauuuauaucagcaauu

SEQ ID NO: 821987 - RNA, 20 nt, Artificial Sequence
  Synthetic
auguucuaugaagagcaauu

SEQ ID NO: 821988 - RNA, 20 nt, Artificial Sequence
  Synthetic
agaagcugagucaggcaauu

SEQ ID NO: 821989 - RNA, 20 nt, Artificial Sequence
  Synthetic
auuucaugcuguaggcaauu

SEQ ID NO: 821990 - RNA, 20 nt, Artificial Sequence
  Synthetic
aagaaacaaacaaugcaauu

SEQ ID NO: 821991 - RNA, 20 nt, Artificial Sequence
  Synthetic
auaaaauuaaauaugcaauu

SEQ ID NO: 821992 - RNA, 20 nt, Artificial Sequence
  Synthetic
uguuaaacuauuaugcaauu

SEQ ID NO: 821993 - RNA, 20 nt, Artificial Sequence
  Synthetic
ucuuugucuuaacugcaauu

SEQ ID NO: 821994 - RNA, 20 nt, Artificial Sequence
  Synthetic
aaucauaauacauugcaauu

SEQ ID NO: 821995 - RNA, 20 nt, Artificial Sequence
  Synthetic
uagugaugauaaaaucaauu

SEQ ID NO: 821996 - RNA, 20 nt, Artificial Sequence
  Synthetic
auuugagaaugcaaucaauu

SEQ ID NO: 821997 - RNA, 20 nt, Artificial Sequence
  Synthetic
agcacacagcagaaucaauu

SEQ ID NO: 821998 - RNA, 20 nt, Artificial Sequence
  Synthetic
uuuugucuguauaaucaauu

SEQ ID NO: 821999 - RNA, 20 nt, Artificial Sequence
  Synthetic
auagagucuguagaucaauu

SEQ ID NO: 822000 - RNA, 20 nt, Artificial Sequence
  Synthetic
cucgcccauuugccucaauu

SEQ ID NO: 822001 - RNA, 20 nt, Artificial Sequence
  Synthetic
aauugcaucccaucucaauu

SEQ ID NO: 822002 - RNA, 20 nt, Artificial Sequence
  Synthetic
ucccauauguuuggucaauu

SEQ ID NO: 822003 - RNA, 20 nt, Artificial Sequence
  Synthetic
uuuaaguggagaugucaauu

SEQ ID NO: 822004 - RNA, 20 nt, Artificial Sequence
  Synthetic
ccacgacucuucugucaauu

SEQ ID NO: 822005 - RNA, 20 nt, Artificial Sequence
  Synthetic
uaaauacaaauaauucaauu

SEQ ID NO: 822006 - RNA, 20 nt, Artificial Sequence
  Synthetic
acugauauucauauucaauu

SEQ ID NO: 822007 - RNA, 20 nt, Artificial Sequence
  Synthetic
aacagccguuuucuucaauu

SEQ ID NO: 822008 - RNA, 20 nt, Artificial Sequence
  Synthetic
ucaaugggacaaaaagaauu

SEQ ID NO: 822009 - RNA, 20 nt, Artificial Sequence
  Synthetic
ugaaauauaauaaaagaauu

SEQ ID NO: 822010 - RNA, 20 nt, Artificial Sequence
  Synthetic
aauuuaaaaaagaaagaauu

SEQ ID NO: 822011 - RNA, 20 nt, Artificial Sequence
  Synthetic
acagggagagguaaagaauu

SEQ ID NO: 822012 - RNA, 20 nt, Artificial Sequence
  Synthetic
uuuuauucaugacaagaauu

SEQ ID NO: 822013 - RNA, 20 nt, Artificial Sequence
  Synthetic
aauauagaauaccaagaauu

SEQ ID NO: 822014 - RNA, 20 nt, Artificial Sequence
  Synthetic
acugaacugaaagaagaauu

SEQ ID NO: 822015 - RNA, 20 nt, Artificial Sequence
  Synthetic
cguugucacagagaagaauu

SEQ ID NO: 822016 - RNA, 20 nt, Artificial Sequence
  Synthetic
ccuaccccaagggaagaauu

SEQ ID NO: 822017 - RNA, 20 nt, Artificial Sequence
  Synthetic
uggagauauaauuaagaauu

SEQ ID NO: 822018 - RNA, 20 nt, Artificial Sequence
  Synthetic
ucauacaacugaacagaauu

SEQ ID NO: 822019 - RNA, 20 nt, Artificial Sequence
  Synthetic
uugcuagucugaacagaauu

SEQ ID NO: 822020 - RNA, 20 nt, Artificial Sequence
  Synthetic
cugacuuucuuuacagaauu

SEQ ID NO: 822021 - RNA, 20 nt, Artificial Sequence
  Synthetic
cuacauggaggcccagaauu

SEQ ID NO: 822022 - RNA, 20 nt, Artificial Sequence
  Synthetic
aagaggauagagccagaauu

SEQ ID NO: 822023 - RNA, 20 nt, Artificial Sequence
  Synthetic
uaagaaggaacaucagaauu

SEQ ID NO: 822024 - RNA, 20 nt, Artificial Sequence
  Synthetic
aaucuaaacucuucagaauu

SEQ ID NO: 822025 - RNA, 20 nt, Artificial Sequence
  Synthetic
ucaccaaaguguucagaauu

SEQ ID NO: 822026 - RNA, 20 nt, Artificial Sequence
  Synthetic
uaaacaaucaaaagagaauu

SEQ ID NO: 822027 - RNA, 20 nt, Artificial Sequence
  Synthetic
uuaagagagguaagagaauu

SEQ ID NO: 822028 - RNA, 20 nt, Artificial Sequence
  Synthetic
ucauucugguuaagagaauu

SEQ ID NO: 822029 - RNA, 20 nt, Artificial Sequence
  Synthetic
agauacacacagagagaauu

SEQ ID NO: 822030 - RNA, 20 nt, Artificial Sequence
  Synthetic
aaugugagaaauggagaauu

SEQ ID NO: 822031 - RNA, 20 nt, Artificial Sequence
  Synthetic
ugcaacauccuuggagaauu

SEQ ID NO: 822032 - RNA, 20 nt, Artificial Sequence
  Synthetic
ccuuuugacuuaugagaauu

SEQ ID NO: 822033 - RNA, 20 nt, Artificial Sequence
  Synthetic
auauaagauaauugagaauu

SEQ ID NO: 822034 - RNA, 20 nt, Artificial Sequence
  Synthetic
aggaucaguaaaauagaauu

SEQ ID NO: 822035 - RNA, 20 nt, Artificial Sequence
  Synthetic
aauuucugcaucauagaauu

SEQ ID NO: 822036 - RNA, 20 nt, Artificial Sequence
  Synthetic
uuguucaaagugauagaauu

SEQ ID NO: 822037 - RNA, 20 nt, Artificial Sequence
  Synthetic
uuaucuuuucuuauagaauu

SEQ ID NO: 822038 - RNA, 20 nt, Artificial Sequence
  Synthetic
aaacacaucaggcuagaauu

SEQ ID NO: 822039 - RNA, 20 nt, Artificial Sequence
  Synthetic
aggagcuaaugucuagaauu

SEQ ID NO: 822040 - RNA, 20 nt, Artificial Sequence
  Synthetic
acacaaaaaagaguagaauu

SEQ ID NO: 822041 - RNA, 20 nt, Artificial Sequence
  Synthetic
uuugcaccucugguagaauu

SEQ ID NO: 822042 - RNA, 20 nt, Artificial Sequence
  Synthetic
cuuguaccucugguagaauu

SEQ ID NO: 822043 - RNA, 20 nt, Artificial Sequence
  Synthetic
uuucugagcuugguagaauu

SEQ ID NO: 822044 - RNA, 20 nt, Artificial Sequence
  Synthetic
uuuauaacuuucuuagaauu

SEQ ID NO: 822045 - RNA, 20 nt, Artificial Sequence
  Synthetic
agcucaaugaaguuagaauu

SEQ ID NO: 822046 - RNA, 20 nt, Artificial Sequence
  Synthetic
cauuaaugacauaucgaauu

SEQ ID NO: 822047 - RNA, 20 nt, Artificial Sequence
  Synthetic
uuauucccuggcaaggaauu

SEQ ID NO: 822048 - RNA, 20 nt, Artificial Sequence
  Synthetic
acauagucagaccaggaauu

SEQ ID NO: 822049 - RNA, 20 nt, Artificial Sequence
  Synthetic
aacaguggaagccaggaauu

SEQ ID NO: 822050 - RNA, 20 nt, Artificial Sequence
  Synthetic
caaucuugaaagcaggaauu

SEQ ID NO: 822051 - RNA, 20 nt, Artificial Sequence
  Synthetic
uugaggguuaacuaggaauu

SEQ ID NO: 822052 - RNA, 20 nt, Artificial Sequence
  Synthetic
aacaguaagaaguaggaauu

SEQ ID NO: 822053 - RNA, 20 nt, Artificial Sequence
  Synthetic
aaugacuaauuguaggaauu

SEQ ID NO: 822054 - RNA, 20 nt, Artificial Sequence
  Synthetic
uuaauuaaagacagggaauu

SEQ ID NO: 822055 - RNA, 20 nt, Artificial Sequence
  Synthetic
uugaguacagcgagggaauu

SEQ ID NO: 822056 - RNA, 20 nt, Artificial Sequence
  Synthetic
caccuaacugcgagggaauu

SEQ ID NO: 822057 - RNA, 20 nt, Artificial Sequence
  Synthetic
aaccucaaagggagggaauu

SEQ ID NO: 822058 - RNA, 20 nt, Artificial Sequence
  Synthetic
auagguuuggagugggaauu

SEQ ID NO: 822059 - RNA, 20 nt, Artificial Sequence
  Synthetic
auuguggugaguugggaauu

SEQ ID NO: 822060 - RNA, 20 nt, Artificial Sequence
  Synthetic
augccacugaguauggaauu

SEQ ID NO: 822061 - RNA, 20 nt, Artificial Sequence
  Synthetic
uuucugcagaagcuggaauu

SEQ ID NO: 822062 - RNA, 20 nt, Artificial Sequence
  Synthetic
agaguccugucaguggaauu

SEQ ID NO: 822063 - RNA, 20 nt, Artificial Sequence
  Synthetic
uuucaucuauuaguggaauu

SEQ ID NO: 822064 - RNA, 20 nt, Artificial Sequence
  Synthetic
aaaucuccguggguggaauu

SEQ ID NO: 822065 - RNA, 20 nt, Artificial Sequence
  Synthetic
auuuuaaaugguguggaauu

SEQ ID NO: 822066 - RNA, 20 nt, Artificial Sequence
  Synthetic
caauuguuuuuguuggaauu

SEQ ID NO: 822067 - RNA, 20 nt, Artificial Sequence
  Synthetic
acuucauuccauuuggaauu

SEQ ID NO: 822068 - RNA, 20 nt, Artificial Sequence
  Synthetic
caaacuuguuauuuggaauu

SEQ ID NO: 822069 - RNA, 20 nt, Artificial Sequence
  Synthetic
auucaaacaguuuuggaauu

SEQ ID NO: 822070 - RNA, 20 nt, Artificial Sequence
  Synthetic
cuagccaaauaaaaugaauu

SEQ ID NO: 822071 - RNA, 20 nt, Artificial Sequence
  Synthetic
acaagauagaucaaugaauu

SEQ ID NO: 822072 - RNA, 20 nt, Artificial Sequence
  Synthetic
uuuuguaugucagaugaauu

SEQ ID NO: 822073 - RNA, 20 nt, Artificial Sequence
  Synthetic
uggaugagcauagaugaauu

SEQ ID NO: 822074 - RNA, 20 nt, Artificial Sequence
  Synthetic
acagaauagauagaugaauu

SEQ ID NO: 822075 - RNA, 20 nt, Artificial Sequence
  Synthetic
agaaagacaugggaugaauu

SEQ ID NO: 822076 - RNA, 20 nt, Artificial Sequence
  Synthetic
uguauacaaugugaugaauu

SEQ ID NO: 822077 - RNA, 20 nt, Artificial Sequence
  Synthetic
cuguuauuauuauaugaauu

SEQ ID NO: 822078 - RNA, 20 nt, Artificial Sequence
  Synthetic
acuuucuguuucuaugaauu

SEQ ID NO: 822079 - RNA, 20 nt, Artificial Sequence
  Synthetic
uaguguucugauuaugaauu

SEQ ID NO: 822080 - RNA, 20 nt, Artificial Sequence
  Synthetic
auaauugaguuaacugaauu

SEQ ID NO: 822081 - RNA, 20 nt, Artificial Sequence
  Synthetic
acauuaucgacaccugaauu

SEQ ID NO: 822082 - RNA, 20 nt, Artificial Sequence
  Synthetic
aaaaauaauaauccugaauu

SEQ ID NO: 822083 - RNA, 20 nt, Artificial Sequence
  Synthetic
uuuaauguaaaugcugaauu

SEQ ID NO: 822084 - RNA, 20 nt, Artificial Sequence
  Synthetic
aucuaaguuuauucugaauu

SEQ ID NO: 822085 - RNA, 20 nt, Artificial Sequence
  Synthetic
cuaaaaaucuccagugaauu

SEQ ID NO: 822086 - RNA, 20 nt, Artificial Sequence
  Synthetic
acaaccaguaguagugaauu

SEQ ID NO: 822087 - RNA, 20 nt, Artificial Sequence
  Synthetic
cagaaauuguguggugaauu

SEQ ID NO: 822088 - RNA, 20 nt, Artificial Sequence
  Synthetic
agacagaaaugcugugaauu

SEQ ID NO: 822089 - RNA, 20 nt, Artificial Sequence
  Synthetic
aaaguugaguuaauugaauu

SEQ ID NO: 822090 - RNA, 20 nt, Artificial Sequence
  Synthetic
ucuacaaaggugauugaauu

SEQ ID NO: 822091 - RNA, 20 nt, Artificial Sequence
  Synthetic
uuuucuuuaauuauugaauu

SEQ ID NO: 822092 - RNA, 20 nt, Artificial Sequence
  Synthetic
aaugauaauuuacuugaauu

SEQ ID NO: 822093 - RNA, 20 nt, Artificial Sequence
  Synthetic
caauauugaauuguugaauu

SEQ ID NO: 822094 - RNA, 20 nt, Artificial Sequence
  Synthetic
uuucugucuauuguugaauu

SEQ ID NO: 822095 - RNA, 20 nt, Artificial Sequence
  Synthetic
uaccauugggcuuuugaauu

SEQ ID NO: 822096 - RNA, 20 nt, Artificial Sequence
  Synthetic
ucaccaauauagaaauaauu

SEQ ID NO: 822097 - RNA, 20 nt, Artificial Sequence
  Synthetic
aauuacagaaauaaauaauu

SEQ ID NO: 822098 - RNA, 20 nt, Artificial Sequence
  Synthetic
uucacauugaauaaauaauu

SEQ ID NO: 822099 - RNA, 20 nt, Artificial Sequence
  Synthetic
aguuucuagcuuaaauaauu

SEQ ID NO: 822100 - RNA, 20 nt, Artificial Sequence
  Synthetic
ucuaaacuaauucaauaauu

SEQ ID NO: 822101 - RNA, 20 nt, Artificial Sequence
  Synthetic
cucccugacuuagaauaauu

SEQ ID NO: 822102 - RNA, 20 nt, Artificial Sequence
  Synthetic
uugucuaggaaggaauaauu

SEQ ID NO: 822103 - RNA, 20 nt, Artificial Sequence
  Synthetic
ucuaacaguuuggaauaauu

SEQ ID NO: 822104 - RNA, 20 nt, Artificial Sequence
  Synthetic
acauauuuaaaugaauaauu

SEQ ID NO: 822105 - RNA, 20 nt, Artificial Sequence
  Synthetic
uucuguuguaucuaauaauu

SEQ ID NO: 822106 - RNA, 20 nt, Artificial Sequence
  Synthetic
uggcuacaauguacauaauu

SEQ ID NO: 822107 - RNA, 20 nt, Artificial Sequence
  Synthetic
cuuguaagcacaccauaauu

SEQ ID NO: 822108 - RNA, 20 nt, Artificial Sequence
  Synthetic
ugcuguaccauuccauaauu

SEQ ID NO: 822109 - RNA, 20 nt, Artificial Sequence
  Synthetic
auguaaugaguaucauaauu

SEQ ID NO: 822110 - RNA, 20 nt, Artificial Sequence
  Synthetic
cagccucagugcucauaauu

SEQ ID NO: 822111 - RNA, 20 nt, Artificial Sequence
  Synthetic
uaagguugugagucauaauu

SEQ ID NO: 822112 - RNA, 20 nt, Artificial Sequence
  Synthetic
caacaaagugaaagauaauu

SEQ ID NO: 822113 - RNA, 20 nt, Artificial Sequence
  Synthetic
cuuaagauguucagauaauu

SEQ ID NO: 822114 - RNA, 20 nt, Artificial Sequence
  Synthetic
agcaagcaaaagggauaauu

SEQ ID NO: 822115 - RNA, 20 nt, Artificial Sequence
  Synthetic
aauauggccaagauauaauu

SEQ ID NO: 822116 - RNA, 20 nt, Artificial Sequence
  Synthetic
uuuuuguggucuguauaauu

SEQ ID NO: 822117 - RNA, 20 nt, Artificial Sequence
  Synthetic
caaacccccagcuuauaauu

SEQ ID NO: 822118 - RNA, 20 nt, Artificial Sequence
  Synthetic
cuggaugacauguuauaauu

SEQ ID NO: 822119 - RNA, 20 nt, Artificial Sequence
  Synthetic
ugcuuuguuuuguuauaauu

SEQ ID NO: 822120 - RNA, 20 nt, Artificial Sequence
  Synthetic
uuuaauuuacuuaacuaauu

SEQ ID NO: 822121 - RNA, 20 nt, Artificial Sequence
  Synthetic
uugccuucauuuaacuaauu

SEQ ID NO: 822122 - RNA, 20 nt, Artificial Sequence
  Synthetic
auagccuaaccugacuaauu

SEQ ID NO: 822123 - RNA, 20 nt, Artificial Sequence
  Synthetic
auugcaauagccuacuaauu

SEQ ID NO: 822124 - RNA, 20 nt, Artificial Sequence
  Synthetic
uuuaauugguauuacuaauu

SEQ ID NO: 822125 - RNA, 20 nt, Artificial Sequence
  Synthetic
caugagcaaauaggcuaauu

SEQ ID NO: 822126 - RNA, 20 nt, Artificial Sequence
  Synthetic
aaugaagacuuuggcuaauu

SEQ ID NO: 822127 - RNA, 20 nt, Artificial Sequence
  Synthetic
uccacccaugauugcuaauu

SEQ ID NO: 822128 - RNA, 20 nt, Artificial Sequence
  Synthetic
ucuuuuucugucaucuaauu

SEQ ID NO: 822129 - RNA, 20 nt, Artificial Sequence
  Synthetic
aagauacagaaacucuaauu

SEQ ID NO: 822130 - RNA, 20 nt, Artificial Sequence
  Synthetic
ccagucuuacaagucuaauu

SEQ ID NO: 822131 - RNA, 20 nt, Artificial Sequence
  Synthetic
acuugaagcacauucuaauu

SEQ ID NO: 822132 - RNA, 20 nt, Artificial Sequence
  Synthetic
uuacccuuaagcuucuaauu

SEQ ID NO: 822133 - RNA, 20 nt, Artificial Sequence
  Synthetic
aggcugaauauuuucuaauu

SEQ ID NO: 822134 - RNA, 20 nt, Artificial Sequence
  Synthetic
uuaaacaguagaaaguaauu

SEQ ID NO: 822135 - RNA, 20 nt, Artificial Sequence
  Synthetic
auguuaaacuucaaguaauu

SEQ ID NO: 822136 - RNA, 20 nt, Artificial Sequence
  Synthetic
aauggacuaauacaguaauu

SEQ ID NO: 822137 - RNA, 20 nt, Artificial Sequence
  Synthetic
auuacauuuagggaguaauu

SEQ ID NO: 822138 - RNA, 20 nt, Artificial Sequence
  Synthetic
aguaugagauuauaguaauu

SEQ ID NO: 822139 - RNA, 20 nt, Artificial Sequence
  Synthetic
uauauauguugcuaguaauu

SEQ ID NO: 822140 - RNA, 20 nt, Artificial Sequence
  Synthetic
uuuuccauaaaaagguaauu

SEQ ID NO: 822141 - RNA, 20 nt, Artificial Sequence
  Synthetic
aagguaucuauaagguaauu

SEQ ID NO: 822142 - RNA, 20 nt, Artificial Sequence
  Synthetic
auugauccuauuggguaauu

SEQ ID NO: 822143 - RNA, 20 nt, Artificial Sequence
  Synthetic
ucacaaagguacauguaauu

SEQ ID NO: 822144 - RNA, 20 nt, Artificial Sequence
  Synthetic
acucuuaaucucauguaauu

SEQ ID NO: 822145 - RNA, 20 nt, Artificial Sequence
  Synthetic
cuagggauuuggcuguaauu

SEQ ID NO: 822146 - RNA, 20 nt, Artificial Sequence
  Synthetic
uuauuuaauagucuguaauu

SEQ ID NO: 822147 - RNA, 20 nt, Artificial Sequence
  Synthetic
agcaagucucaaguguaauu

SEQ ID NO: 822148 - RNA, 20 nt, Artificial Sequence
  Synthetic
uaucauuuaagauuguaauu

SEQ ID NO: 822149 - RNA, 20 nt, Artificial Sequence
  Synthetic
uuuauucugauauuguaauu

SEQ ID NO: 822150 - RNA, 20 nt, Artificial Sequence
  Synthetic
auuuuacugcuauuguaauu

SEQ ID NO: 822151 - RNA, 20 nt, Artificial Sequence
  Synthetic
cauacuuagguuuuguaauu

SEQ ID NO: 822152 - RNA, 20 nt, Artificial Sequence
  Synthetic
auugaaucuguaaauuaauu

SEQ ID NO: 822153 - RNA, 20 nt, Artificial Sequence
  Synthetic
uuugucucgcuccauuaauu

SEQ ID NO: 822154 - RNA, 20 nt, Artificial Sequence
  Synthetic
agauuucuaaaagauuaauu

SEQ ID NO: 822155 - RNA, 20 nt, Artificial Sequence
  Synthetic
uagaaugcaauagauuaauu

SEQ ID NO: 822156 - RNA, 20 nt, Artificial Sequence
  Synthetic
acacuccugacugauuaauu

SEQ ID NO: 822157 - RNA, 20 nt, Artificial Sequence
  Synthetic
ucauuaaagagugauuaauu

SEQ ID NO: 822158 - RNA, 20 nt, Artificial Sequence
  Synthetic
cuuauauuaguauauuaauu

SEQ ID NO: 822159 - RNA, 20 nt, Artificial Sequence
  Synthetic
aauugcaaagacuauuaauu

SEQ ID NO: 822160 - RNA, 20 nt, Artificial Sequence
  Synthetic
cuuacuguuuacuauuaauu

SEQ ID NO: 822161 - RNA, 20 nt, Artificial Sequence
  Synthetic
auuuagcuguugacuuaauu

SEQ ID NO: 822162 - RNA, 20 nt, Artificial Sequence
  Synthetic
agagaacuccugccuuaauu

SEQ ID NO: 822163 - RNA, 20 nt, Artificial Sequence
  Synthetic
cauuucuuaccaucuuaauu

SEQ ID NO: 822164 - RNA, 20 nt, Artificial Sequence
  Synthetic
aaaauaaugacugguuaauu

SEQ ID NO: 822165 - RNA, 20 nt, Artificial Sequence
  Synthetic
aaaaauuugaaauguuaauu

SEQ ID NO: 822166 - RNA, 20 nt, Artificial Sequence
  Synthetic
auugaaaauguaauuuaauu

SEQ ID NO: 822167 - RNA, 20 nt, Artificial Sequence
  Synthetic
agugucaguuccauuuaauu

SEQ ID NO: 822168 - RNA, 20 nt, Artificial Sequence
  Synthetic
uagaagacaaauauuuaauu

SEQ ID NO: 822169 - RNA, 20 nt, Artificial Sequence
  Synthetic
aaaaacauauauauuuaauu

SEQ ID NO: 822170 - RNA, 20 nt, Artificial Sequence
  Synthetic
augcaguauuauauuuaauu

SEQ ID NO: 822171 - RNA, 20 nt, Artificial Sequence
  Synthetic
aucuaauauccauuuuaauu

SEQ ID NO: 822172 - RNA, 20 nt, Artificial Sequence
  Synthetic
acauaccacugauuuuaauu

SEQ ID NO: 822173 - RNA, 20 nt, Artificial Sequence
  Synthetic
ucauugaacuuauuuuaauu

SEQ ID NO: 822174 - RNA, 20 nt, Artificial Sequence
  Synthetic
caguaaauuuuauuuuaauu

SEQ ID NO: 822175 - RNA, 20 nt, Artificial Sequence
  Synthetic
ccagucugugucuuuuaauu

SEQ ID NO: 822176 - RNA, 20 nt, Artificial Sequence
  Synthetic
acuguacuucaguuuuaauu

SEQ ID NO: 822177 - RNA, 20 nt, Artificial Sequence
  Synthetic
uuggauaugucguuuuaauu

SEQ ID NO: 822178 - RNA, 20 nt, Artificial Sequence
  Synthetic
ucagcaccuagaaaaacauu

SEQ ID NO: 822179 - RNA, 20 nt, Artificial Sequence
  Synthetic
cuuuuaaauaugaaaacauu

SEQ ID NO: 822180 - RNA, 20 nt, Artificial Sequence
  Synthetic
cauuaaagaaauaaaacauu

SEQ ID NO: 822181 - RNA, 20 nt, Artificial Sequence
  Synthetic
acauggggucauaaaacauu

SEQ ID NO: 822182 - RNA, 20 nt, Artificial Sequence
  Synthetic
cuacuaaaaauacaaacauu

SEQ ID NO: 822183 - RNA, 20 nt, Artificial Sequence
  Synthetic
uuauugauguuccaaacauu

SEQ ID NO: 822184 - RNA, 20 nt, Artificial Sequence
  Synthetic
auaaaacuuccagaaacauu

SEQ ID NO: 822185 - RNA, 20 nt, Artificial Sequence
  Synthetic
uuauucucuagggaaacauu

SEQ ID NO: 822186 - RNA, 20 nt, Artificial Sequence
  Synthetic
uauaagugggccuaaacauu

SEQ ID NO: 822187 - RNA, 20 nt, Artificial Sequence
  Synthetic
auaguuagaagcuaaacauu

SEQ ID NO: 822188 - RNA, 20 nt, Artificial Sequence
  Synthetic
ccucaccaccuguaaacauu

SEQ ID NO: 822189 - RNA, 20 nt, Artificial Sequence
  Synthetic
caggccccaccaccaacauu

SEQ ID NO: 822190 - RNA, 20 nt, Artificial Sequence
  Synthetic
caggccccaccuccaacauu

SEQ ID NO: 822191 - RNA, 20 nt, Artificial Sequence
  Synthetic
uuaaaaaauuaagcaacauu

SEQ ID NO: 822192 - RNA, 20 nt, Artificial Sequence
  Synthetic
ucucuuccauugucaacauu

SEQ ID NO: 822193 - RNA, 20 nt, Artificial Sequence
  Synthetic
ucaagugcuuugucaacauu

SEQ ID NO: 822194 - RNA, 20 nt, Artificial Sequence
  Synthetic
acaaccccacuuucaacauu

SEQ ID NO: 822195 - RNA, 20 nt, Artificial Sequence
  Synthetic
ugagaaguaaaaagaacauu

SEQ ID NO: 822196 - RNA, 20 nt, Artificial Sequence
  Synthetic
uauaccacuugaggaacauu

SEQ ID NO: 822197 - RNA, 20 nt, Artificial Sequence
  Synthetic
aaauugcuuauuggaacauu

SEQ ID NO: 822198 - RNA, 20 nt, Artificial Sequence
  Synthetic
uauaaaguaaaaugaacauu

SEQ ID NO: 822199 - RNA, 20 nt, Artificial Sequence
  Synthetic
aauaauugcaucugaacauu

SEQ ID NO: 822200 - RNA, 20 nt, Artificial Sequence
  Synthetic
uuaacucgucauugaacauu

SEQ ID NO: 822201 - RNA, 20 nt, Artificial Sequence
  Synthetic
uuucacuauuauugaacauu

SEQ ID NO: 822202 - RNA, 20 nt, Artificial Sequence
  Synthetic
uaucuaagaaagauaacauu

SEQ ID NO: 822203 - RNA, 20 nt, Artificial Sequence
  Synthetic
ucagcuuuuauuauaacauu

SEQ ID NO: 822204 - RNA, 20 nt, Artificial Sequence
  Synthetic
uugccuuggugauuaacauu

SEQ ID NO: 822205 - RNA, 20 nt, Artificial Sequence
  Synthetic
uugucuugccuauuaacauu

SEQ ID NO: 822206 - RNA, 20 nt, Artificial Sequence
  Synthetic
uaaaaguuauuauuaacauu

SEQ ID NO: 822207 - RNA, 20 nt, Artificial Sequence
  Synthetic
aauacacaauacuuaacauu

SEQ ID NO: 822208 - RNA, 20 nt, Artificial Sequence
  Synthetic
uugucuuggcgcuuaacauu

SEQ ID NO: 822209 - RNA, 20 nt, Artificial Sequence
  Synthetic
cugcuuucugaguuaacauu

SEQ ID NO: 822210 - RNA, 20 nt, Artificial Sequence
  Synthetic
acagaagggaauuuaacauu

SEQ ID NO: 822211 - RNA, 20 nt, Artificial Sequence
  Synthetic
uuaacucuucauuuaacauu

SEQ ID NO: 822212 - RNA, 20 nt, Artificial Sequence
  Synthetic
auauauuuuauuuuaacauu

SEQ ID NO: 822213 - RNA, 20 nt, Artificial Sequence
  Synthetic
cgcaaugucaaaaacacauu

SEQ ID NO: 822214 - RNA, 20 nt, Artificial Sequence
  Synthetic
auaagggacucaaacacauu

SEQ ID NO: 822215 - RNA, 20 nt, Artificial Sequence
  Synthetic
cuuucaucugaagacacauu

SEQ ID NO: 822216 - RNA, 20 nt, Artificial Sequence
  Synthetic
uucucucaauuugacacauu

SEQ ID NO: 822217 - RNA, 20 nt, Artificial Sequence
  Synthetic
ccgggcuugagauacacauu

SEQ ID NO: 822218 - RNA, 20 nt, Artificial Sequence
  Synthetic
auuguagcuauaagcacauu

SEQ ID NO: 822219 - RNA, 20 nt, Artificial Sequence
  Synthetic
cucuaagagcauagcacauu

SEQ ID NO: 822220 - RNA, 20 nt, Artificial Sequence
  Synthetic
ucuuaucagaaacucacauu

SEQ ID NO: 822221 - RNA, 20 nt, Artificial Sequence
  Synthetic
acaugaagucugcucacauu

SEQ ID NO: 822222 - RNA, 20 nt, Artificial Sequence
  Synthetic
caauguguaacagucacauu

SEQ ID NO: 822223 - RNA, 20 nt, Artificial Sequence
  Synthetic
cagacuucuggugucacauu

SEQ ID NO: 822224 - RNA, 20 nt, Artificial Sequence
  Synthetic
aaauucuugguugucacauu

SEQ ID NO: 822225 - RNA, 20 nt, Artificial Sequence
  Synthetic
ugauuacuuaaauucacauu

SEQ ID NO: 822226 - RNA, 20 nt, Artificial Sequence
  Synthetic
acaauuuagucauucacauu

SEQ ID NO: 822227 - RNA, 20 nt, Artificial Sequence
  Synthetic
agagaaaaaagguucacauu

SEQ ID NO: 822228 - RNA, 20 nt, Artificial Sequence
  Synthetic
ucaaaagagaaccagacauu

SEQ ID NO: 822229 - RNA, 20 nt, Artificial Sequence
  Synthetic
uuagagauggcagagacauu

SEQ ID NO: 822230 - RNA, 20 nt, Artificial Sequence
  Synthetic
cucauagcauuagagacauu

SEQ ID NO: 822231 - RNA, 20 nt, Artificial Sequence
  Synthetic
ccgcaggguaccgagacauu

SEQ ID NO: 822232 - RNA, 20 nt, Artificial Sequence
  Synthetic
agagaaggaaaggagacauu

SEQ ID NO: 822233 - RNA, 20 nt, Artificial Sequence
  Synthetic
uucuuuccucaggagacauu

SEQ ID NO: 822234 - RNA, 20 nt, Artificial Sequence
  Synthetic
ugcacacaaagggagacauu

SEQ ID NO: 822235 - RNA, 20 nt, Artificial Sequence
  Synthetic
aggugaaaacaauagacauu

SEQ ID NO: 822236 - RNA, 20 nt, Artificial Sequence
  Synthetic
uuugcuccccaagggacauu

SEQ ID NO: 822237 - RNA, 20 nt, Artificial Sequence
  Synthetic
ucugcuaaucaauggacauu

SEQ ID NO: 822238 - RNA, 20 nt, Artificial Sequence
  Synthetic
uucccagguucauggacauu

SEQ ID NO: 822239 - RNA, 20 nt, Artificial Sequence
  Synthetic
uucauuagcugauggacauu

SEQ ID NO: 822240 - RNA, 20 nt, Artificial Sequence
  Synthetic
uuuacaugcguauggacauu

SEQ ID NO: 822241 - RNA, 20 nt, Artificial Sequence
  Synthetic
ccuacagaaguuuggacauu

SEQ ID NO: 822242 - RNA, 20 nt, Artificial Sequence
  Synthetic
auuucaccagugaugacauu

SEQ ID NO: 822243 - RNA, 20 nt, Artificial Sequence
  Synthetic
acccucaaggugaugacauu

SEQ ID NO: 822244 - RNA, 20 nt, Artificial Sequence
  Synthetic
caauuccaaugccugacauu

SEQ ID NO: 822245 - RNA, 20 nt, Artificial Sequence
  Synthetic
uauaugacacucaauacauu

SEQ ID NO: 822246 - RNA, 20 nt, Artificial Sequence
  Synthetic
auaguacaguuacauacauu

SEQ ID NO: 822247 - RNA, 20 nt, Artificial Sequence
  Synthetic
cucaacaacagauauacauu

SEQ ID NO: 822248 - RNA, 20 nt, Artificial Sequence
  Synthetic
ccacagaaaauauauacauu

SEQ ID NO: 822249 - RNA, 20 nt, Artificial Sequence
  Synthetic
ugauugugaagcuauacauu

SEQ ID NO: 822250 - RNA, 20 nt, Artificial Sequence
  Synthetic
aaaggcauaaacacuacauu

SEQ ID NO: 822251 - RNA, 20 nt, Artificial Sequence
  Synthetic
uauacacaaaucacuacauu

SEQ ID NO: 822252 - RNA, 20 nt, Artificial Sequence
  Synthetic
uaaacucuguagacuacauu

SEQ ID NO: 822253 - RNA, 20 nt, Artificial Sequence
  Synthetic
aguacuuuauuugcuacauu

SEQ ID NO: 822254 - RNA, 20 nt, Artificial Sequence
  Synthetic
uccuauuuaaaaucuacauu

SEQ ID NO: 822255 - RNA, 20 nt, Artificial Sequence
  Synthetic
aucaacccaucaucuacauu

SEQ ID NO: 822256 - RNA, 20 nt, Artificial Sequence
  Synthetic
aucaacccgucaucuacauu

SEQ ID NO: 822257 - RNA, 20 nt, Artificial Sequence
  Synthetic
aucaaccugucaucuacauu

SEQ ID NO: 822258 - RNA, 20 nt, Artificial Sequence
  Synthetic
aucaacccuucaucuacauu

SEQ ID NO: 822259 - RNA, 20 nt, Artificial Sequence
  Synthetic
uuauuuuaagucucuacauu

SEQ ID NO: 822260 - RNA, 20 nt, Artificial Sequence
  Synthetic
caacugagaacaaguacauu

SEQ ID NO: 822261 - RNA, 20 nt, Artificial Sequence
  Synthetic
ugggggugagccaguacauu

SEQ ID NO: 822262 - RNA, 20 nt, Artificial Sequence
  Synthetic
cucuuaucucaagguacauu

SEQ ID NO: 822263 - RNA, 20 nt, Artificial Sequence
  Synthetic
aaaaaaaaaauguguacauu

SEQ ID NO: 822264 - RNA, 20 nt, Artificial Sequence
  Synthetic
cauggcucaugcauuacauu

SEQ ID NO: 822265 - RNA, 20 nt, Artificial Sequence
  Synthetic
aggacucuugugauuacauu

SEQ ID NO: 822266 - RNA, 20 nt, Artificial Sequence
  Synthetic
aauacaaccuuuauuacauu

SEQ ID NO: 822267 - RNA, 20 nt, Artificial Sequence
  Synthetic
ugcugugcagaccuuacauu

SEQ ID NO: 822268 - RNA, 20 nt, Artificial Sequence
  Synthetic
auuaacucgucauuuacauu

SEQ ID NO: 822269 - RNA, 20 nt, Artificial Sequence
  Synthetic
auuaacuugucauuuacauu

SEQ ID NO: 822270 - RNA, 20 nt, Artificial Sequence
  Synthetic
cguugaucauauuuuacauu

SEQ ID NO: 822271 - RNA, 20 nt, Artificial Sequence
  Synthetic
cugggauuuuucaaaccauu

SEQ ID NO: 822272 - RNA, 20 nt, Artificial Sequence
  Synthetic
auugcaaagaggcaaccauu

SEQ ID NO: 822273 - RNA, 20 nt, Artificial Sequence
  Synthetic
agagaugggguuucaccauu

SEQ ID NO: 822274 - RNA, 20 nt, Artificial Sequence
  Synthetic
acagaaguagugagaccauu

SEQ ID NO: 822275 - RNA, 20 nt, Artificial Sequence
  Synthetic
acacaaaagaauagaccauu

SEQ ID NO: 822276 - RNA, 20 nt, Artificial Sequence
  Synthetic
cugauuagauauagaccauu

SEQ ID NO: 822277 - RNA, 20 nt, Artificial Sequence
  Synthetic
aaaugcuuucuuggaccauu

SEQ ID NO: 822278 - RNA, 20 nt, Artificial Sequence
  Synthetic
auauaagagguuauaccauu

SEQ ID NO: 822279 - RNA, 20 nt, Artificial Sequence
  Synthetic
aaaagaaaacucuuaccauu

SEQ ID NO: 822280 - RNA, 20 nt, Artificial Sequence
  Synthetic
caaaaccuguucuuaccauu

SEQ ID NO: 822281 - RNA, 20 nt, Artificial Sequence
  Synthetic
uuaacucgucauuuaccauu

SEQ ID NO: 822282 - RNA, 20 nt, Artificial Sequence
  Synthetic
aaaauaacccucuacccauu

SEQ ID NO: 822283 - RNA, 20 nt, Artificial Sequence
  Synthetic
aguucugccaaaaccccauu

SEQ ID NO: 822284 - RNA, 20 nt, Artificial Sequence
  Synthetic
uuugucuuuuucuccccauu

SEQ ID NO: 822285 - RNA, 20 nt, Artificial Sequence
  Synthetic
ucauugguuuucugcccauu

SEQ ID NO: 822286 - RNA, 20 nt, Artificial Sequence
  Synthetic
ccaucucucagaaucccauu

SEQ ID NO: 822287 - RNA, 20 nt, Artificial Sequence
  Synthetic
cugaaauuccuucucccauu

SEQ ID NO: 822288 - RNA, 20 nt, Artificial Sequence
  Synthetic
uuuggccaauuucucccauu

SEQ ID NO: 822289 - RNA, 20 nt, Artificial Sequence
  Synthetic
ugcaaaaguuuucucccauu

SEQ ID NO: 822290 - RNA, 20 nt, Artificial Sequence
  Synthetic
uaaagagacccuuucccauu

SEQ ID NO: 822291 - RNA, 20 nt, Artificial Sequence
  Synthetic
auacuucuucaaaagccauu

SEQ ID NO: 822292 - RNA, 20 nt, Artificial Sequence
  Synthetic
agaguaugucuaaagccauu

SEQ ID NO: 822293 - RNA, 20 nt, Artificial Sequence
  Synthetic
aaauuaaauguuaagccauu

SEQ ID NO: 822294 - RNA, 20 nt, Artificial Sequence
  Synthetic
uuaaagauaaaacagccauu

SEQ ID NO: 822295 - RNA, 20 nt, Artificial Sequence
  Synthetic
uuaauaaauaaagagccauu

SEQ ID NO: 822296 - RNA, 20 nt, Artificial Sequence
  Synthetic
ugccuuccacgagagccauu

SEQ ID NO: 822297 - RNA, 20 nt, Artificial Sequence
  Synthetic
aaaacuucuuccuagccauu

SEQ ID NO: 822298 - RNA, 20 nt, Artificial Sequence
  Synthetic
caacauuucccuuagccauu

SEQ ID NO: 822299 - RNA, 20 nt, Artificial Sequence
  Synthetic
uugaggcuucaugggccauu

SEQ ID NO: 822300 - RNA, 20 nt, Artificial Sequence
  Synthetic
ugauuucuuccauggccauu

SEQ ID NO: 822301 - RNA, 20 nt, Artificial Sequence
  Synthetic
aauaaaugcagaaugccauu

SEQ ID NO: 822302 - RNA, 20 nt, Artificial Sequence
  Synthetic
ugaugacuaaauaugccauu

SEQ ID NO: 822303 - RNA, 20 nt, Artificial Sequence
  Synthetic
aaaugugaagacgugccauu

SEQ ID NO: 822304 - RNA, 20 nt, Artificial Sequence
  Synthetic
augccaggcacuuugccauu

SEQ ID NO: 822305 - RNA, 20 nt, Artificial Sequence
  Synthetic
uucuuggagugaaauccauu

SEQ ID NO: 822306 - RNA, 20 nt, Artificial Sequence
  Synthetic
caugaacaucuuaauccauu

SEQ ID NO: 822307 - RNA, 20 nt, Artificial Sequence
  Synthetic
ucuuguuguuuuaauccauu

SEQ ID NO: 822308 - RNA, 20 nt, Artificial Sequence
  Synthetic
cccaccuccaaauauccauu

SEQ ID NO: 822309 - RNA, 20 nt, Artificial Sequence
  Synthetic
ccaacaauauucacuccauu

SEQ ID NO: 822310 - RNA, 20 nt, Artificial Sequence
  Synthetic
aucaagaucuaaucuccauu

SEQ ID NO: 822311 - RNA, 20 nt, Artificial Sequence
  Synthetic
ucauaccucucuucuccauu

SEQ ID NO: 822312 - RNA, 20 nt, Artificial Sequence
  Synthetic
agucauuuuaauaguccauu

SEQ ID NO: 822313 - RNA, 20 nt, Artificial Sequence
  Synthetic
auaugucuguuagguccauu

SEQ ID NO: 822314 - RNA, 20 nt, Artificial Sequence
  Synthetic
ugggaauagagaauuccauu

SEQ ID NO: 822315 - RNA, 20 nt, Artificial Sequence
  Synthetic
uuuuuuuacuucauuccauu

SEQ ID NO: 822316 - RNA, 20 nt, Artificial Sequence
  Synthetic
agggccuuuuuacuuccauu

SEQ ID NO: 822317 - RNA, 20 nt, Artificial Sequence
  Synthetic
augauauagaguguuccauu

SEQ ID NO: 822318 - RNA, 20 nt, Artificial Sequence
  Synthetic
uguaucuguaauuuuccauu

SEQ ID NO: 822319 - RNA, 20 nt, Artificial Sequence
  Synthetic
cacaauuaugguuuuccauu

SEQ ID NO: 822320 - RNA, 20 nt, Artificial Sequence
  Synthetic
aauauuaggaaacaagcauu

SEQ ID NO: 822321 - RNA, 20 nt, Artificial Sequence
  Synthetic
auaaguuagcaucaagcauu

SEQ ID NO: 822322 - RNA, 20 nt, Artificial Sequence
  Synthetic
uuauuagagaaagaagcauu

SEQ ID NO: 822323 - RNA, 20 nt, Artificial Sequence
  Synthetic
cuuaauccaucugaagcauu

SEQ ID NO: 822324 - RNA, 20 nt, Artificial Sequence
  Synthetic
ucaacaaaaaaauaagcauu

SEQ ID NO: 822325 - RNA, 20 nt, Artificial Sequence
  Synthetic
ucugcggccuugccagcauu

SEQ ID NO: 822326 - RNA, 20 nt, Artificial Sequence
  Synthetic
aaaccuaaaugugcagcauu

SEQ ID NO: 822327 - RNA, 20 nt, Artificial Sequence
  Synthetic
agugucugauuugcagcauu

SEQ ID NO: 822328 - RNA, 20 nt, Artificial Sequence
  Synthetic
uccauaucacuaucagcauu

SEQ ID NO: 822329 - RNA, 20 nt, Artificial Sequence
  Synthetic
agggucugucccucagcauu

SEQ ID NO: 822330 - RNA, 20 nt, Artificial Sequence
  Synthetic
ccaugcagcuauucagcauu

SEQ ID NO: 822331 - RNA, 20 nt, Artificial Sequence
  Synthetic
aaaaggugagggagagcauu

SEQ ID NO: 822332 - RNA, 20 nt, Artificial Sequence
  Synthetic
auuugcagcccaggagcauu

SEQ ID NO: 822333 - RNA, 20 nt, Artificial Sequence
  Synthetic
ugagggggauggggagcauu

SEQ ID NO: 822334 - RNA, 20 nt, Artificial Sequence
  Synthetic
aaggggggagggauagcauu

SEQ ID NO: 822335 - RNA, 20 nt, Artificial Sequence
  Synthetic
agggggggagggauagcauu

SEQ ID NO: 822336 - RNA, 20 nt, Artificial Sequence
  Synthetic
cuaacucaucaucuagcauu

SEQ ID NO: 822337 - RNA, 20 nt, Artificial Sequence
  Synthetic
cuaacccgucaucuagcauu

SEQ ID NO: 822338 - RNA, 20 nt, Artificial Sequence
  Synthetic
cuaacucgucaucuagcauu

SEQ ID NO: 822339 - RNA, 20 nt, Artificial Sequence
  Synthetic
cuaacgugucaucuagcauu

SEQ ID NO: 822340 - RNA, 20 nt, Artificial Sequence
  Synthetic
cuaacuugucaucuagcauu

SEQ ID NO: 822341 - RNA, 20 nt, Artificial Sequence
  Synthetic
accaauauggcaguagcauu

SEQ ID NO: 822342 - RNA, 20 nt, Artificial Sequence
  Synthetic
ccucacaucauuguagcauu

SEQ ID NO: 822343 - RNA, 20 nt, Artificial Sequence
  Synthetic
uuagcucaucauuuagcauu

SEQ ID NO: 822344 - RNA, 20 nt, Artificial Sequence
  Synthetic
uucacuucucauuuagcauu

SEQ ID NO: 822345 - RNA, 20 nt, Artificial Sequence
  Synthetic
uuaacucgucauuuagcauu

SEQ ID NO: 822346 - RNA, 20 nt, Artificial Sequence
  Synthetic
auacuuuaaguuuuagcauu

SEQ ID NO: 822347 - RNA, 20 nt, Artificial Sequence
  Synthetic
caacugcagcagcacgcauu

SEQ ID NO: 822348 - RNA, 20 nt, Artificial Sequence
  Synthetic
agggggaaaggagacgcauu

SEQ ID NO: 822349 - RNA, 20 nt, Artificial Sequence
  Synthetic
caaugggggguacaggcauu

SEQ ID NO: 822350 - RNA, 20 nt, Artificial Sequence
  Synthetic
uauuuacucacccaggcauu

SEQ ID NO: 822351 - RNA, 20 nt, Artificial Sequence
  Synthetic
aacaaaaacacuuaggcauu

SEQ ID NO: 822352 - RNA, 20 nt, Artificial Sequence
  Synthetic
aguggcaaaucuggggcauu

SEQ ID NO: 822353 - RNA, 20 nt, Artificial Sequence
  Synthetic
cuuucuaucuguggggcauu

SEQ ID NO: 822354 - RNA, 20 nt, Artificial Sequence
  Synthetic
cuugucgauugaugggcauu

SEQ ID NO: 822355 - RNA, 20 nt, Artificial Sequence
  Synthetic
uaagagcucaauugggcauu

SEQ ID NO: 822356 - RNA, 20 nt, Artificial Sequence
  Synthetic
uucucccauuauugggcauu

SEQ ID NO: 822357 - RNA, 20 nt, Artificial Sequence
  Synthetic
auauuugaaaggauggcauu

SEQ ID NO: 822358 - RNA, 20 nt, Artificial Sequence
  Synthetic
aggaacuccaggauggcauu

SEQ ID NO: 822359 - RNA, 20 nt, Artificial Sequence
  Synthetic
uuuccagcaaguauggcauu

SEQ ID NO: 822360 - RNA, 20 nt, Artificial Sequence
  Synthetic
aagauaaaggcucuggcauu

SEQ ID NO: 822361 - RNA, 20 nt, Artificial Sequence
  Synthetic
aagaaaagagggguggcauu

SEQ ID NO: 822362 - RNA, 20 nt, Artificial Sequence
  Synthetic
acaaacuaguguuuggcauu

SEQ ID NO: 822363 - RNA, 20 nt, Artificial Sequence
  Synthetic
cugaaacaacuuuuggcauu

SEQ ID NO: 822364 - RNA, 20 nt, Artificial Sequence
  Synthetic
uuuuaagcccccaaugcauu

SEQ ID NO: 822365 - RNA, 20 nt, Artificial Sequence
  Synthetic
uacaguggaaugaaugcauu

SEQ ID NO: 822366 - RNA, 20 nt, Artificial Sequence
  Synthetic
uuuuaagccccacaugcauu

SEQ ID NO: 822367 - RNA, 20 nt, Artificial Sequence
  Synthetic
uuuuaagccccgcaugcauu

SEQ ID NO: 822368 - RNA, 20 nt, Artificial Sequence
  Synthetic
uuuuuuuagauguaugcauu

SEQ ID NO: 822369 - RNA, 20 nt, Artificial Sequence
  Synthetic
ccagaaucuccuacugcauu

SEQ ID NO: 822370 - RNA, 20 nt, Artificial Sequence
  Synthetic
uuccugaaaagaccugcauu

SEQ ID NO: 822371 - RNA, 20 nt, Artificial Sequence
  Synthetic
acugcaaguucugcugcauu

SEQ ID NO: 822372 - RNA, 20 nt, Artificial Sequence
  Synthetic
uuuuuugggggaggugcauu

SEQ ID NO: 822373 - RNA, 20 nt, Artificial Sequence
  Synthetic
ucccaguaaaagggugcauu

SEQ ID NO: 822374 - RNA, 20 nt, Artificial Sequence
  Synthetic
cagcuugaaauaugugcauu

SEQ ID NO: 822375 - RNA, 20 nt, Artificial Sequence
  Synthetic
agugauaucaggauugcauu

SEQ ID NO: 822376 - RNA, 20 nt, Artificial Sequence
  Synthetic
cuggcuucuauucuugcauu

SEQ ID NO: 822377 - RNA, 20 nt, Artificial Sequence
  Synthetic
caacagaaguagguugcauu

SEQ ID NO: 822378 - RNA, 20 nt, Artificial Sequence
  Synthetic
uugauaaaaauauuugcauu

SEQ ID NO: 822379 - RNA, 20 nt, Artificial Sequence
  Synthetic
cuucauaguuccuuugcauu

SEQ ID NO: 822380 - RNA, 20 nt, Artificial Sequence
  Synthetic
aaguuuaaaucaaaaucauu

SEQ ID NO: 822381 - RNA, 20 nt, Artificial Sequence
  Synthetic
cauaauuugaucaaaucauu

SEQ ID NO: 822382 - RNA, 20 nt, Artificial Sequence
  Synthetic
aaauuauaguucaaaucauu

SEQ ID NO: 822383 - RNA, 20 nt, Artificial Sequence
  Synthetic
agggaaacuucgaaaucauu

SEQ ID NO: 822384 - RNA, 20 nt, Artificial Sequence
  Synthetic
ucccaccacacccaaucauu

SEQ ID NO: 822385 - RNA, 20 nt, Artificial Sequence
  Synthetic
uuugcauuggaagaaucauu

SEQ ID NO: 822386 - RNA, 20 nt, Artificial Sequence
  Synthetic
uguagucaaaggagaucauu

SEQ ID NO: 822387 - RNA, 20 nt, Artificial Sequence
  Synthetic
uacacagcuaauagaucauu

SEQ ID NO: 822388 - RNA, 20 nt, Artificial Sequence
  Synthetic
cagacuaacagcggaucauu

SEQ ID NO: 822389 - RNA, 20 nt, Artificial Sequence
  Synthetic
uauaaaaaucacugaucauu

SEQ ID NO: 822390 - RNA, 20 nt, Artificial Sequence
  Synthetic
uggauacuuauaauaucauu

SEQ ID NO: 822391 - RNA, 20 nt, Artificial Sequence
  Synthetic
uaaauuauaaucauaucauu

SEQ ID NO: 822392 - RNA, 20 nt, Artificial Sequence
  Synthetic
uuauauguuuugcuaucauu

SEQ ID NO: 822393 - RNA, 20 nt, Artificial Sequence
  Synthetic
cguacagaagaguuaucauu

SEQ ID NO: 822394 - RNA, 20 nt, Artificial Sequence
  Synthetic
cuauacuucuuuuuaucauu

SEQ ID NO: 822395 - RNA, 20 nt, Artificial Sequence
  Synthetic
uugaauaaaaaucacucauu

SEQ ID NO: 822396 - RNA, 20 nt, Artificial Sequence
  Synthetic
cuguccaccugcuacucauu

SEQ ID NO: 822397 - RNA, 20 nt, Artificial Sequence
  Synthetic
augaucauuuccaccucauu

SEQ ID NO: 822398 - RNA, 20 nt, Artificial Sequence
  Synthetic
cacaacacuucacccucauu

SEQ ID NO: 822399 - RNA, 20 nt, Artificial Sequence
  Synthetic
aagagaagaaagcccucauu

SEQ ID NO: 822400 - RNA, 20 nt, Artificial Sequence
  Synthetic
uuggguacagauagcucauu

SEQ ID NO: 822401 - RNA, 20 nt, Artificial Sequence
  Synthetic
auauuaauugagugcucauu

SEQ ID NO: 822402 - RNA, 20 nt, Artificial Sequence
  Synthetic
auucuuauugaaaucucauu

SEQ ID NO: 822403 - RNA, 20 nt, Artificial Sequence
  Synthetic
aacauaugaggaaucucauu

SEQ ID NO: 822404 - RNA, 20 nt, Artificial Sequence
  Synthetic
uucauaacaauagucucauu

SEQ ID NO: 822405 - RNA, 20 nt, Artificial Sequence
  Synthetic
auaguggauuuggucucauu

SEQ ID NO: 822406 - RNA, 20 nt, Artificial Sequence
  Synthetic
aagacuacacaugucucauu

SEQ ID NO: 822407 - RNA, 20 nt, Artificial Sequence
  Synthetic
ucacucauuuacuucucauu

SEQ ID NO: 822408 - RNA, 20 nt, Artificial Sequence
  Synthetic
aaauuuuuucucuucucauu

SEQ ID NO: 822409 - RNA, 20 nt, Artificial Sequence
  Synthetic
uaucacugaauuuucucauu

SEQ ID NO: 822410 - RNA, 20 nt, Artificial Sequence
  Synthetic
uguaucaaauaacagucauu

SEQ ID NO: 822411 - RNA, 20 nt, Artificial Sequence
  Synthetic
agagaaggaugcuagucauu

SEQ ID NO: 822412 - RNA, 20 nt, Artificial Sequence
  Synthetic
ucagagacauuuuagucauu

SEQ ID NO: 822413 - RNA, 20 nt, Artificial Sequence
  Synthetic
aaaauaauuuuuuagucauu

SEQ ID NO: 822414 - RNA, 20 nt, Artificial Sequence
  Synthetic
ccacaguuccacaggucauu

SEQ ID NO: 822415 - RNA, 20 nt, Artificial Sequence
  Synthetic
caacuuaaaaugaggucauu

SEQ ID NO: 822416 - RNA, 20 nt, Artificial Sequence
  Synthetic
augcuagcagaaaugucauu

SEQ ID NO: 822417 - RNA, 20 nt, Artificial Sequence
  Synthetic
acaauuaagaugaugucauu

SEQ ID NO: 822418 - RNA, 20 nt, Artificial Sequence
  Synthetic
accuaggaaauucugucauu

SEQ ID NO: 822419 - RNA, 20 nt, Artificial Sequence
  Synthetic
acaugauuuguggugucauu

SEQ ID NO: 822420 - RNA, 20 nt, Artificial Sequence
  Synthetic
agcuucuuaaaugugucauu

SEQ ID NO: 822421 - RNA, 20 nt, Artificial Sequence
  Synthetic
auucugagagaugugucauu

SEQ ID NO: 822422 - RNA, 20 nt, Artificial Sequence
  Synthetic
augucaaugcccuugucauu

SEQ ID NO: 822423 - RNA, 20 nt, Artificial Sequence
  Synthetic
ucauacaauugguugucauu

SEQ ID NO: 822424 - RNA, 20 nt, Artificial Sequence
  Synthetic
acauuagaauacaauucauu

SEQ ID NO: 822425 - RNA, 20 nt, Artificial Sequence
  Synthetic
uccauguguuaagauucauu

SEQ ID NO: 822426 - RNA, 20 nt, Artificial Sequence
  Synthetic
aacuaauguugauauucauu

SEQ ID NO: 822427 - RNA, 20 nt, Artificial Sequence
  Synthetic
aaaguaaaacacccuucauu

SEQ ID NO: 822428 - RNA, 20 nt, Artificial Sequence
  Synthetic
aucuuaaaacugccuucauu

SEQ ID NO: 822429 - RNA, 20 nt, Artificial Sequence
  Synthetic
ugauucuuuaucucuucauu

SEQ ID NO: 822430 - RNA, 20 nt, Artificial Sequence
  Synthetic
uaaaaauaacuagguucauu

SEQ ID NO: 822431 - RNA, 20 nt, Artificial Sequence
  Synthetic
uauuguuguuuaauuucauu

SEQ ID NO: 822432 - RNA, 20 nt, Artificial Sequence
  Synthetic
aaaaauauggacauuucauu

SEQ ID NO: 822433 - RNA, 20 nt, Artificial Sequence
  Synthetic
aggugagguuggauuucauu

SEQ ID NO: 822434 - RNA, 20 nt, Artificial Sequence
  Synthetic
aucauaggauuuauuucauu

SEQ ID NO: 822435 - RNA, 20 nt, Artificial Sequence
  Synthetic
cugggccugagccuuucauu

SEQ ID NO: 822436 - RNA, 20 nt, Artificial Sequence
  Synthetic
auauguauucugcuuucauu

SEQ ID NO: 822437 - RNA, 20 nt, Artificial Sequence
  Synthetic
uaauugguauggguuucauu

SEQ ID NO: 822438 - RNA, 20 nt, Artificial Sequence
  Synthetic
ccaauucuagaauuuucauu

SEQ ID NO: 822439 - RNA, 20 nt, Artificial Sequence
  Synthetic
aaauaucagaacuuuucauu

SEQ ID NO: 822440 - RNA, 20 nt, Artificial Sequence
  Synthetic
cuucugggcuucuuuucauu

SEQ ID NO: 822441 - RNA, 20 nt, Artificial Sequence
  Synthetic
aguaacgauuauuuuucauu

SEQ ID NO: 822442 - RNA, 20 nt, Artificial Sequence
  Synthetic
auauauauauuuuuuucauu

SEQ ID NO: 822443 - RNA, 20 nt, Artificial Sequence
  Synthetic
uaaugaggaagaaaaagauu

SEQ ID NO: 822444 - RNA, 20 nt, Artificial Sequence
  Synthetic
uaugcacauccacaaagauu

SEQ ID NO: 822445 - RNA, 20 nt, Artificial Sequence
  Synthetic
aauuuggacccagaaagauu

SEQ ID NO: 822446 - RNA, 20 nt, Artificial Sequence
  Synthetic
auuaagcugaaauaaagauu

SEQ ID NO: 822447 - RNA, 20 nt, Artificial Sequence
  Synthetic
aauuuuucuuaguaaagauu

SEQ ID NO: 822448 - RNA, 20 nt, Artificial Sequence
  Synthetic
uuucauaaugauuaaagauu

SEQ ID NO: 822449 - RNA, 20 nt, Artificial Sequence
  Synthetic
uaaaaaugcucaacaagauu

SEQ ID NO: 822450 - RNA, 20 nt, Artificial Sequence
  Synthetic
agggugcaagccccaagauu

SEQ ID NO: 822451 - RNA, 20 nt, Artificial Sequence
  Synthetic
uauucacaauagccaagauu

SEQ ID NO: 822452 - RNA, 20 nt, Artificial Sequence
  Synthetic
uguucauaauagccaagauu

SEQ ID NO: 822453 - RNA, 20 nt, Artificial Sequence
  Synthetic
uguaguaagccuccaagauu

SEQ ID NO: 822454 - RNA, 20 nt, Artificial Sequence
  Synthetic
uguucacaacaggcaagauu

SEQ ID NO: 822455 - RNA, 20 nt, Artificial Sequence
  Synthetic
aaauuccugcuuucaagauu

SEQ ID NO: 822456 - RNA, 20 nt, Artificial Sequence
  Synthetic
cauaaucaguugggaagauu

SEQ ID NO: 822457 - RNA, 20 nt, Artificial Sequence
  Synthetic
caauuaggcuacauaagauu

SEQ ID NO: 822458 - RNA, 20 nt, Artificial Sequence
  Synthetic
ccacaaauaaauauaagauu

SEQ ID NO: 822459 - RNA, 20 nt, Artificial Sequence
  Synthetic
ucacauuucaauauaagauu

SEQ ID NO: 822460 - RNA, 20 nt, Artificial Sequence
  Synthetic
ccuuacucaguuguaagauu

SEQ ID NO: 822461 - RNA, 20 nt, Artificial Sequence
  Synthetic
uguauaauauuguuaagauu

SEQ ID NO: 822462 - RNA, 20 nt, Artificial Sequence
  Synthetic
uaagccuaaacuuuaagauu

SEQ ID NO: 822463 - RNA, 20 nt, Artificial Sequence
  Synthetic
uaagacaacuguuuaagauu

SEQ ID NO: 822464 - RNA, 20 nt, Artificial Sequence
  Synthetic
auagagauggagaacagauu

SEQ ID NO: 822465 - RNA, 20 nt, Artificial Sequence
  Synthetic
ccuaggaagaggaacagauu

SEQ ID NO: 822466 - RNA, 20 nt, Artificial Sequence
  Synthetic
aaagagacaacccacagauu

SEQ ID NO: 822467 - RNA, 20 nt, Artificial Sequence
  Synthetic
caauuaaacagggacagauu

SEQ ID NO: 822468 - RNA, 20 nt, Artificial Sequence
  Synthetic
aacauguacaaaaccagauu

SEQ ID NO: 822469 - RNA, 20 nt, Artificial Sequence
  Synthetic
accuugaaugucaccagauu

SEQ ID NO: 822470 - RNA, 20 nt, Artificial Sequence
  Synthetic
cucugcccucuugccagauu

SEQ ID NO: 822471 - RNA, 20 nt, Artificial Sequence
  Synthetic
caguaagaccuuuccagauu

SEQ ID NO: 822472 - RNA, 20 nt, Artificial Sequence
  Synthetic
cuucuauauuaaagcagauu

SEQ ID NO: 822473 - RNA, 20 nt, Artificial Sequence
  Synthetic
caacagaagacuagcagauu

SEQ ID NO: 822474 - RNA, 20 nt, Artificial Sequence
  Synthetic
ucugguagggguagcagauu

SEQ ID NO: 822475 - RNA, 20 nt, Artificial Sequence
  Synthetic
cccugaggggaaggcagauu

SEQ ID NO: 822476 - RNA, 20 nt, Artificial Sequence
  Synthetic
cagaaaagaaggggcagauu

SEQ ID NO: 822477 - RNA, 20 nt, Artificial Sequence
  Synthetic
cagcugaacuuuggcagauu

SEQ ID NO: 822478 - RNA, 20 nt, Artificial Sequence
  Synthetic
agaagcguagugugcagauu

SEQ ID NO: 822479 - RNA, 20 nt, Artificial Sequence
  Synthetic
aggccucagaguugcagauu

SEQ ID NO: 822480 - RNA, 20 nt, Artificial Sequence
  Synthetic
agguaaucguaaaucagauu

SEQ ID NO: 822481 - RNA, 20 nt, Artificial Sequence
  Synthetic
cuuugaauuacagucagauu

SEQ ID NO: 822482 - RNA, 20 nt, Artificial Sequence
  Synthetic
uguuaagaucaugucagauu

SEQ ID NO: 822483 - RNA, 20 nt, Artificial Sequence
  Synthetic
cauucuauugaugucagauu

SEQ ID NO: 822484 - RNA, 20 nt, Artificial Sequence
  Synthetic
acagauggcacauucagauu

SEQ ID NO: 822485 - RNA, 20 nt, Artificial Sequence
  Synthetic
uacauucuaaaacagagauu

SEQ ID NO: 822486 - RNA, 20 nt, Artificial Sequence
  Synthetic
agguuggauagagagagauu

SEQ ID NO: 822487 - RNA, 20 nt, Artificial Sequence
  Synthetic
aacaaauagguggagagauu

SEQ ID NO: 822488 - RNA, 20 nt, Artificial Sequence
  Synthetic
auauuuauaagcuagagauu

SEQ ID NO: 822489 - RNA, 20 nt, Artificial Sequence
  Synthetic
acaggauuuugguagagauu

SEQ ID NO: 822490 - RNA, 20 nt, Artificial Sequence
  Synthetic
cguagguaaaacacgagauu

SEQ ID NO: 822491 - RNA, 20 nt, Artificial Sequence
  Synthetic
agaaagaacugcccgagauu

SEQ ID NO: 822492 - RNA, 20 nt, Artificial Sequence
  Synthetic
auaaaauucuuaaggagauu

SEQ ID NO: 822493 - RNA, 20 nt, Artificial Sequence
  Synthetic
cauagaauuaaagggagauu

SEQ ID NO: 822494 - RNA, 20 nt, Artificial Sequence
  Synthetic
uuacaauucaaaaugagauu

SEQ ID NO: 822495 - RNA, 20 nt, Artificial Sequence
  Synthetic
cuacaauucagaaugagauu

SEQ ID NO: 822496 - RNA, 20 nt, Artificial Sequence
  Synthetic
ugggaauucaacaugagauu

SEQ ID NO: 822497 - RNA, 20 nt, Artificial Sequence
  Synthetic
ucaaauuucaacaugagauu

SEQ ID NO: 822498 - RNA, 20 nt, Artificial Sequence
  Synthetic
ugugaaagggacaugagauu

SEQ ID NO: 822499 - RNA, 20 nt, Artificial Sequence
  Synthetic
aaaugugaugacaugagauu

SEQ ID NO: 822500 - RNA, 20 nt, Artificial Sequence
  Synthetic
cuacaauucaagaugagauu

SEQ ID NO: 822501 - RNA, 20 nt, Artificial Sequence
  Synthetic
uuacaauucaagaugagauu

SEQ ID NO: 822502 - RNA, 20 nt, Artificial Sequence
  Synthetic
uaggaauucaagaugagauu

SEQ ID NO: 822503 - RNA, 20 nt, Artificial Sequence
  Synthetic
uuacauuucaagaugagauu

SEQ ID NO: 822504 - RNA, 20 nt, Artificial Sequence
  Synthetic
uuacaguucuagaugagauu

SEQ ID NO: 822505 - RNA, 20 nt, Artificial Sequence
  Synthetic
uuacaauuuaauaugagauu

SEQ ID NO: 822506 - RNA, 20 nt, Artificial Sequence
  Synthetic
uugaaguuguuuaugagauu

SEQ ID NO: 822507 - RNA, 20 nt, Artificial Sequence
  Synthetic
uauuguuugaugcugagauu

SEQ ID NO: 822508 - RNA, 20 nt, Artificial Sequence
  Synthetic
agggaaaaugaagugagauu

SEQ ID NO: 822509 - RNA, 20 nt, Artificial Sequence
  Synthetic
agaacugagacagugagauu

SEQ ID NO: 822510 - RNA, 20 nt, Artificial Sequence
  Synthetic
cuguuauccugagugagauu

SEQ ID NO: 822511 - RNA, 20 nt, Artificial Sequence
  Synthetic
uuacaauucaaggugagauu

SEQ ID NO: 822512 - RNA, 20 nt, Artificial Sequence
  Synthetic
ccauaauucaaggugagauu

SEQ ID NO: 822513 - RNA, 20 nt, Artificial Sequence
  Synthetic
aaguuaccagauaauagauu

SEQ ID NO: 822514 - RNA, 20 nt, Artificial Sequence
  Synthetic
aguuacaaaugccauagauu

SEQ ID NO: 822515 - RNA, 20 nt, Artificial Sequence
  Synthetic
aggagagauagugauagauu

SEQ ID NO: 822516 - RNA, 20 nt, Artificial Sequence
  Synthetic
cucuguuugauauauagauu

SEQ ID NO: 822517 - RNA, 20 nt, Artificial Sequence
  Synthetic
cuauccucucucuauagauu

SEQ ID NO: 822518 - RNA, 20 nt, Artificial Sequence
  Synthetic
uuggccugccuuacuagauu

SEQ ID NO: 822519 - RNA, 20 nt, Artificial Sequence
  Synthetic
uucuucuuuucaccuagauu

SEQ ID NO: 822520 - RNA, 20 nt, Artificial Sequence
  Synthetic
aauacaugugucaguagauu

SEQ ID NO: 822521 - RNA, 20 nt, Artificial Sequence
  Synthetic
acaccaaucagacguagauu

SEQ ID NO: 822522 - RNA, 20 nt, Artificial Sequence
  Synthetic
cuuuuucuaaaggguagauu

SEQ ID NO: 822523 - RNA, 20 nt, Artificial Sequence
  Synthetic
caaugccuccucuguagauu

SEQ ID NO: 822524 - RNA, 20 nt, Artificial Sequence
  Synthetic
aggaaauuaaauuguagauu

SEQ ID NO: 822525 - RNA, 20 nt, Artificial Sequence
  Synthetic
aagagaguuuauuguagauu

SEQ ID NO: 822526 - RNA, 20 nt, Artificial Sequence
  Synthetic
augaacccugugguuagauu

SEQ ID NO: 822527 - RNA, 20 nt, Artificial Sequence
  Synthetic
uuuugaccuaaauuuagauu

SEQ ID NO: 822528 - RNA, 20 nt, Artificial Sequence
  Synthetic
uaacuggcagcauuuagauu

SEQ ID NO: 822529 - RNA, 20 nt, Artificial Sequence
  Synthetic
cuaauauuaaaguuuagauu

SEQ ID NO: 822530 - RNA, 20 nt, Artificial Sequence
  Synthetic
augauaucaggguuuagauu

SEQ ID NO: 822531 - RNA, 20 nt, Artificial Sequence
  Synthetic
aaucaaaacauuuuuagauu

SEQ ID NO: 822532 - RNA, 20 nt, Artificial Sequence
  Synthetic
agauuguaauuucaacgauu

SEQ ID NO: 822533 - RNA, 20 nt, Artificial Sequence
  Synthetic
auaggaguucacccacgauu

SEQ ID NO: 822534 - RNA, 20 nt, Artificial Sequence
  Synthetic
cuugagggauguauacgauu

SEQ ID NO: 822535 - RNA, 20 nt, Artificial Sequence
  Synthetic
cauggaccuuacauccgauu

SEQ ID NO: 822536 - RNA, 20 nt, Artificial Sequence
  Synthetic
auagauagaauggggcgauu

SEQ ID NO: 822537 - RNA, 20 nt, Artificial Sequence
  Synthetic
uuucuguaaaaaaugcgauu

SEQ ID NO: 822538 - RNA, 20 nt, Artificial Sequence
  Synthetic
uuuuuguccugauaucgauu

SEQ ID NO: 822539 - RNA, 20 nt, Artificial Sequence
  Synthetic
uuucuuuugcuuggucgauu

SEQ ID NO: 822540 - RNA, 20 nt, Artificial Sequence
  Synthetic
aaugaggaugguuuucgauu

SEQ ID NO: 822541 - RNA, 20 nt, Artificial Sequence
  Synthetic
aaaaucuccaaaaaaggauu

SEQ ID NO: 822542 - RNA, 20 nt, Artificial Sequence
  Synthetic
uuauauaccccaaaaggauu

SEQ ID NO: 822543 - RNA, 20 nt, Artificial Sequence
  Synthetic
ugccuguaaucccaaggauu

SEQ ID NO: 822544 - RNA, 20 nt, Artificial Sequence
  Synthetic
uauucugugggucaaggauu

SEQ ID NO: 822545 - RNA, 20 nt, Artificial Sequence
  Synthetic
ucuaugggaugagaaggauu

SEQ ID NO: 822546 - RNA, 20 nt, Artificial Sequence
  Synthetic
uacccaaaacaugaaggauu

SEQ ID NO: 822547 - RNA, 20 nt, Artificial Sequence
  Synthetic
ccuguuccucaugaaggauu

SEQ ID NO: 822548 - RNA, 20 nt, Artificial Sequence
  Synthetic
ccauuaaaugccacaggauu

SEQ ID NO: 822549 - RNA, 20 nt, Artificial Sequence
  Synthetic
aaaggaaagggagcaggauu

SEQ ID NO: 822550 - RNA, 20 nt, Artificial Sequence
  Synthetic
caaaaaaagauggcaggauu

SEQ ID NO: 822551 - RNA, 20 nt, Artificial Sequence
  Synthetic
acaggcaacaaugcaggauu

SEQ ID NO: 822552 - RNA, 20 nt, Artificial Sequence
  Synthetic
uuucuguagucugcaggauu

SEQ ID NO: 822553 - RNA, 20 nt, Artificial Sequence
  Synthetic
uuuuaaggacugagaggauu

SEQ ID NO: 822554 - RNA, 20 nt, Artificial Sequence
  Synthetic
agcugggugagaggaggauu

SEQ ID NO: 822555 - RNA, 20 nt, Artificial Sequence
  Synthetic
cucacaaccuagggaggauu

SEQ ID NO: 822556 - RNA, 20 nt, Artificial Sequence
  Synthetic
auucuuaaauugugaggauu

SEQ ID NO: 822557 - RNA, 20 nt, Artificial Sequence
  Synthetic
ucuucaauccacauaggauu

SEQ ID NO: 822558 - RNA, 20 nt, Artificial Sequence
  Synthetic
aauuuacuuagucuaggauu

SEQ ID NO: 822559 - RNA, 20 nt, Artificial Sequence
  Synthetic
aaggcagaauccuuaggauu

SEQ ID NO: 822560 - RNA, 20 nt, Artificial Sequence
  Synthetic
aagaggcccuugcagggauu

SEQ ID NO: 822561 - RNA, 20 nt, Artificial Sequence
  Synthetic
caggcccauauucagggauu

SEQ ID NO: 822562 - RNA, 20 nt, Artificial Sequence
  Synthetic
cugcaauucaagacgggauu

SEQ ID NO: 822563 - RNA, 20 nt, Artificial Sequence
  Synthetic
cacacaccaguugggggauu

SEQ ID NO: 822564 - RNA, 20 nt, Artificial Sequence
  Synthetic
acagagcagaagaugggauu

SEQ ID NO: 822565 - RNA, 20 nt, Artificial Sequence
  Synthetic
auucacagguuccugggauu

SEQ ID NO: 822566 - RNA, 20 nt, Artificial Sequence
  Synthetic
uuuucaugagcuuugggauu

SEQ ID NO: 822567 - RNA, 20 nt, Artificial Sequence
  Synthetic
ugcaaaaucaguuugggauu

SEQ ID NO: 822568 - RNA, 20 nt, Artificial Sequence
  Synthetic
aagaaaaagaaaaauggauu

SEQ ID NO: 822569 - RNA, 20 nt, Artificial Sequence
  Synthetic
caucuaaugacuaauggauu

SEQ ID NO: 822570 - RNA, 20 nt, Artificial Sequence
  Synthetic
caauauauaacccauggauu

SEQ ID NO: 822571 - RNA, 20 nt, Artificial Sequence
  Synthetic
aggaaugugugccauggauu

SEQ ID NO: 822572 - RNA, 20 nt, Artificial Sequence
  Synthetic
ugcuauguaucucauggauu

SEQ ID NO: 822573 - RNA, 20 nt, Artificial Sequence
  Synthetic
cacaaggccguucauggauu

SEQ ID NO: 822574 - RNA, 20 nt, Artificial Sequence
  Synthetic
uuguuauggugagauggauu

SEQ ID NO: 822575 - RNA, 20 nt, Artificial Sequence
  Synthetic
caaggaaguguugauggauu

SEQ ID NO: 822576 - RNA, 20 nt, Artificial Sequence
  Synthetic
uguggaaucuaaacuggauu

SEQ ID NO: 822577 - RNA, 20 nt, Artificial Sequence
  Synthetic
uguuaaaagaucacuggauu

SEQ ID NO: 822578 - RNA, 20 nt, Artificial Sequence
  Synthetic
uuaaaacuaaggacuggauu

SEQ ID NO: 822579 - RNA, 20 nt, Artificial Sequence
  Synthetic
uuuuaaugugcuacuggauu

SEQ ID NO: 822580 - RNA, 20 nt, Artificial Sequence
  Synthetic
uuuucaugugcugcuggauu

SEQ ID NO: 822581 - RNA, 20 nt, Artificial Sequence
  Synthetic
uuuugaugugcugcuggauu

SEQ ID NO: 822582 - RNA, 20 nt, Artificial Sequence
  Synthetic
auugggccuugcucuggauu

SEQ ID NO: 822583 - RNA, 20 nt, Artificial Sequence
  Synthetic
uauauugaagccaguggauu

SEQ ID NO: 822584 - RNA, 20 nt, Artificial Sequence
  Synthetic
aagaagaacuauaguggauu

SEQ ID NO: 822585 - RNA, 20 nt, Artificial Sequence
  Synthetic
ugaugauaaugagguggauu

SEQ ID NO: 822586 - RNA, 20 nt, Artificial Sequence
  Synthetic
cuggaaugcagugguggauu

SEQ ID NO: 822587 - RNA, 20 nt, Artificial Sequence
  Synthetic
agauaagugacuauuggauu

SEQ ID NO: 822588 - RNA, 20 nt, Artificial Sequence
  Synthetic
ucccauuucucccuuggauu

SEQ ID NO: 822589 - RNA, 20 nt, Artificial Sequence
  Synthetic
agcauaagggcucuuggauu

SEQ ID NO: 822590 - RNA, 20 nt, Artificial Sequence
  Synthetic
aacaggcaguugguuggauu

SEQ ID NO: 822591 - RNA, 20 nt, Artificial Sequence
  Synthetic
agaaaauggauuguuggauu

SEQ ID NO: 822592 - RNA, 20 nt, Artificial Sequence
  Synthetic
ugaaagcaggaauuuggauu

SEQ ID NO: 822593 - RNA, 20 nt, Artificial Sequence
  Synthetic
cuauggaugaaaaaaugauu

SEQ ID NO: 822594 - RNA, 20 nt, Artificial Sequence
  Synthetic
uuuaaucauugcuaaugauu

SEQ ID NO: 822595 - RNA, 20 nt, Artificial Sequence
  Synthetic
ugaguugaucauuaaugauu

SEQ ID NO: 822596 - RNA, 20 nt, Artificial Sequence
  Synthetic
acaauucuaauuuaaugauu

SEQ ID NO: 822597 - RNA, 20 nt, Artificial Sequence
  Synthetic
uagucucugucaacaugauu

SEQ ID NO: 822598 - RNA, 20 nt, Artificial Sequence
  Synthetic
augggaauucacucaugauu

SEQ ID NO: 822599 - RNA, 20 nt, Artificial Sequence
  Synthetic
augagaguucacucaugauu

SEQ ID NO: 822600 - RNA, 20 nt, Artificial Sequence
  Synthetic
augggaguucacucaugauu

SEQ ID NO: 822601 - RNA, 20 nt, Artificial Sequence
  Synthetic
agccuuucuguuucaugauu

SEQ ID NO: 822602 - RNA, 20 nt, Artificial Sequence
  Synthetic
agacccaagauaagaugauu

SEQ ID NO: 822603 - RNA, 20 nt, Artificial Sequence
  Synthetic
auuuauguggaaauaugauu

SEQ ID NO: 822604 - RNA, 20 nt, Artificial Sequence
  Synthetic
auguuuaaaagcauaugauu

SEQ ID NO: 822605 - RNA, 20 nt, Artificial Sequence
  Synthetic
ugcaagucuuugauaugauu

SEQ ID NO: 822606 - RNA, 20 nt, Artificial Sequence
  Synthetic
ugacuuuggguuauaugauu

SEQ ID NO: 822607 - RNA, 20 nt, Artificial Sequence
  Synthetic
auccaaucuaggguaugauu

SEQ ID NO: 822608 - RNA, 20 nt, Artificial Sequence
  Synthetic
aauugcaauguauuaugauu

SEQ ID NO: 822609 - RNA, 20 nt, Artificial Sequence
  Synthetic
aacuguuguuuauuaugauu

SEQ ID NO: 822610 - RNA, 20 nt, Artificial Sequence
  Synthetic
auuucaguuuccuuaugauu

SEQ ID NO: 822611 - RNA, 20 nt, Artificial Sequence
  Synthetic
cauuuauuagcuuuaugauu

SEQ ID NO: 822612 - RNA, 20 nt, Artificial Sequence
  Synthetic
cuuuauuuuauuaacugauu

SEQ ID NO: 822613 - RNA, 20 nt, Artificial Sequence
  Synthetic
aagacgaagguucacugauu

SEQ ID NO: 822614 - RNA, 20 nt, Artificial Sequence
  Synthetic
ugcauucuuuuacccugauu

SEQ ID NO: 822615 - RNA, 20 nt, Artificial Sequence
  Synthetic
cuaaggcacaugcccugauu

SEQ ID NO: 822616 - RNA, 20 nt, Artificial Sequence
  Synthetic
uugaaucaaauauccugauu

SEQ ID NO: 822617 - RNA, 20 nt, Artificial Sequence
  Synthetic
caacuuaugaugggcugauu

SEQ ID NO: 822618 - RNA, 20 nt, Artificial Sequence
  Synthetic
uuguuugagccuggcugauu

SEQ ID NO: 822619 - RNA, 20 nt, Artificial Sequence
  Synthetic
uauauuuaggugcucugauu

SEQ ID NO: 822620 - RNA, 20 nt, Artificial Sequence
  Synthetic
uguuaauuuuaugucugauu

SEQ ID NO: 822621 - RNA, 20 nt, Artificial Sequence
  Synthetic
uuaaauaauuuauucugauu

SEQ ID NO: 822622 - RNA, 20 nt, Artificial Sequence
  Synthetic
aaaguauaguucaagugauu

SEQ ID NO: 822623 - RNA, 20 nt, Artificial Sequence
  Synthetic
uuucaaaagaaacagugauu

SEQ ID NO: 822624 - RNA, 20 nt, Artificial Sequence
  Synthetic
auuaugacaaggcagugauu

SEQ ID NO: 822625 - RNA, 20 nt, Artificial Sequence
  Synthetic
acagauguguaucagugauu

SEQ ID NO: 822626 - RNA, 20 nt, Artificial Sequence
  Synthetic
cuucauuguagucagugauu

SEQ ID NO: 822627 - RNA, 20 nt, Artificial Sequence
  Synthetic
acagagucaauguagugauu

SEQ ID NO: 822628 - RNA, 20 nt, Artificial Sequence
  Synthetic
uaaggggugauaaggugauu

SEQ ID NO: 822629 - RNA, 20 nt, Artificial Sequence
  Synthetic
cgaagaaaauguaggugauu

SEQ ID NO: 822630 - RNA, 20 nt, Artificial Sequence
  Synthetic
uguuuaucaguugggugauu

SEQ ID NO: 822631 - RNA, 20 nt, Artificial Sequence
  Synthetic
aggguguuuaaguggugauu

SEQ ID NO: 822632 - RNA, 20 nt, Artificial Sequence
  Synthetic
aaaggcagcaauuggugauu

SEQ ID NO: 822633 - RNA, 20 nt, Artificial Sequence
  Synthetic
uggacaguguaaaugugauu

SEQ ID NO: 822634 - RNA, 20 nt, Artificial Sequence
  Synthetic
caaaaucaugccaugugauu

SEQ ID NO: 822635 - RNA, 20 nt, Artificial Sequence
  Synthetic
ugguaauaguagaugugauu

SEQ ID NO: 822636 - RNA, 20 nt, Artificial Sequence
  Synthetic
aauuauguccauaugugauu

SEQ ID NO: 822637 - RNA, 20 nt, Artificial Sequence
  Synthetic
cuuuucauaacuaugugauu

SEQ ID NO: 822638 - RNA, 20 nt, Artificial Sequence
  Synthetic
uuagagaagauacugugauu

SEQ ID NO: 822639 - RNA, 20 nt, Artificial Sequence
  Synthetic
agcucuaauauucugugauu

SEQ ID NO: 822640 - RNA, 20 nt, Artificial Sequence
  Synthetic
auauuuaaauaauugugauu

SEQ ID NO: 822641 - RNA, 20 nt, Artificial Sequence
  Synthetic
uuuauguuccaaaauugauu

SEQ ID NO: 822642 - RNA, 20 nt, Artificial Sequence
  Synthetic
uaugaauauagguauugauu

SEQ ID NO: 822643 - RNA, 20 nt, Artificial Sequence
  Synthetic
uccccuuaucaaacuugauu

SEQ ID NO: 822644 - RNA, 20 nt, Artificial Sequence
  Synthetic
uguugucuauaaacuugauu

SEQ ID NO: 822645 - RNA, 20 nt, Artificial Sequence
  Synthetic
uuugucucacguacuugauu

SEQ ID NO: 822646 - RNA, 20 nt, Artificial Sequence
  Synthetic
auaaaaaucugcccuugauu

SEQ ID NO: 822647 - RNA, 20 nt, Artificial Sequence
  Synthetic
acuuuuccaaaagcuugauu

SEQ ID NO: 822648 - RNA, 20 nt, Artificial Sequence
  Synthetic
ugaagccaacugucuugauu

SEQ ID NO: 822649 - RNA, 20 nt, Artificial Sequence
  Synthetic
aauaguuugcauucuugauu

SEQ ID NO: 822650 - RNA, 20 nt, Artificial Sequence
  Synthetic
caguauucuauuucuugauu

SEQ ID NO: 822651 - RNA, 20 nt, Artificial Sequence
  Synthetic
uuauauuauguuucuugauu

SEQ ID NO: 822652 - RNA, 20 nt, Artificial Sequence
  Synthetic
cuucauguugcagguugauu

SEQ ID NO: 822653 - RNA, 20 nt, Artificial Sequence
  Synthetic
aaauguauauucuguugauu

SEQ ID NO: 822654 - RNA, 20 nt, Artificial Sequence
  Synthetic
ugaaaggcucaaauuugauu

SEQ ID NO: 822655 - RNA, 20 nt, Artificial Sequence
  Synthetic
uguucacaaaggauuugauu

SEQ ID NO: 822656 - RNA, 20 nt, Artificial Sequence
  Synthetic
cacauauuucaucuuugauu

SEQ ID NO: 822657 - RNA, 20 nt, Artificial Sequence
  Synthetic
acaguaagucuucuuugauu

SEQ ID NO: 822658 - RNA, 20 nt, Artificial Sequence
  Synthetic
uuccacaaagcuguuugauu

SEQ ID NO: 822659 - RNA, 20 nt, Artificial Sequence
  Synthetic
ucacuauaaaucuuuugauu

SEQ ID NO: 822660 - RNA, 20 nt, Artificial Sequence
  Synthetic
ccuuugcccaauuuuugauu

SEQ ID NO: 822661 - RNA, 20 nt, Artificial Sequence
  Synthetic
uuuaaucaggcuuuuugauu

SEQ ID NO: 822662 - RNA, 20 nt, Artificial Sequence
  Synthetic
uuaaucauuucuuuuugauu

SEQ ID NO: 822663 - RNA, 20 nt, Artificial Sequence
  Synthetic
uaauagcaugaaaaaauauu

SEQ ID NO: 822664 - RNA, 20 nt, Artificial Sequence
  Synthetic
auacccauucacaaaauauu

SEQ ID NO: 822665 - RNA, 20 nt, Artificial Sequence
  Synthetic
cuuuuuuacugcaaaauauu

SEQ ID NO: 822666 - RNA, 20 nt, Artificial Sequence
  Synthetic
uaaaaaaaaaagaaaauauu

SEQ ID NO: 822667 - RNA, 20 nt, Artificial Sequence
  Synthetic
aucugacaacuuaaaauauu

SEQ ID NO: 822668 - RNA, 20 nt, Artificial Sequence
  Synthetic
auuuguuauguuaaaauauu

SEQ ID NO: 822669 - RNA, 20 nt, Artificial Sequence
  Synthetic
acaguaggucaacaaauauu

SEQ ID NO: 822670 - RNA, 20 nt, Artificial Sequence
  Synthetic
uauuaauauugccaaauauu

SEQ ID NO: 822671 - RNA, 20 nt, Artificial Sequence
  Synthetic
aaacaaaaagcagaaauauu

SEQ ID NO: 822672 - RNA, 20 nt, Artificial Sequence
  Synthetic
uggaacucagaggaaauauu

SEQ ID NO: 822673 - RNA, 20 nt, Artificial Sequence
  Synthetic
uuuugugaugaauaaauauu

SEQ ID NO: 822674 - RNA, 20 nt, Artificial Sequence
  Synthetic
uuuccauauccauaaauauu

SEQ ID NO: 822675 - RNA, 20 nt, Artificial Sequence
  Synthetic
uuagcccuaagauaaauauu

SEQ ID NO: 822676 - RNA, 20 nt, Artificial Sequence
  Synthetic
aaagcauacauauaaauauu

SEQ ID NO: 822677 - RNA, 20 nt, Artificial Sequence
  Synthetic
agcaauuuuaccuaaauauu

SEQ ID NO: 822678 - RNA, 20 nt, Artificial Sequence
  Synthetic
aacugagauugcuaaauauu

SEQ ID NO: 822679 - RNA, 20 nt, Artificial Sequence
  Synthetic
cgaauggccauguaaauauu

SEQ ID NO: 822680 - RNA, 20 nt, Artificial Sequence
  Synthetic
uuuaagauggauuaaauauu

SEQ ID NO: 822681 - RNA, 20 nt, Artificial Sequence
  Synthetic
aaaauuaugcugacaauauu

SEQ ID NO: 822682 - RNA, 20 nt, Artificial Sequence
  Synthetic
aaaugaaacacagcaauauu

SEQ ID NO: 822683 - RNA, 20 nt, Artificial Sequence
  Synthetic
agauuaauaaugucaauauu

SEQ ID NO: 822684 - RNA, 20 nt, Artificial Sequence
  Synthetic
ucuacaucuuugucaauauu

SEQ ID NO: 822685 - RNA, 20 nt, Artificial Sequence
  Synthetic
cuacacauggaaagaauauu

SEQ ID NO: 822686 - RNA, 20 nt, Artificial Sequence
  Synthetic
aauaaauagagcagaauauu

SEQ ID NO: 822687 - RNA, 20 nt, Artificial Sequence
  Synthetic
aaaagaaaauucagaauauu

SEQ ID NO: 822688 - RNA, 20 nt, Artificial Sequence
  Synthetic
aguucuguaaguagaauauu

SEQ ID NO: 822689 - RNA, 20 nt, Artificial Sequence
  Synthetic
cccuugacacaaugaauauu

SEQ ID NO: 822690 - RNA, 20 nt, Artificial Sequence
  Synthetic
ccaggugccucaugaauauu

SEQ ID NO: 822691 - RNA, 20 nt, Artificial Sequence
  Synthetic
uucagauuaaacugaauauu

SEQ ID NO: 822692 - RNA, 20 nt, Artificial Sequence
  Synthetic
aggauaacugaaauaauauu

SEQ ID NO: 822693 - RNA, 20 nt, Artificial Sequence
  Synthetic
aaugauauaagaauaauauu

SEQ ID NO: 822694 - RNA, 20 nt, Artificial Sequence
  Synthetic
auauuguuagccauaauauu

SEQ ID NO: 822695 - RNA, 20 nt, Artificial Sequence
  Synthetic
aguacacuauaccuaauauu

SEQ ID NO: 822696 - RNA, 20 nt, Artificial Sequence
  Synthetic
auguaaagguagguaauauu

SEQ ID NO: 822697 - RNA, 20 nt, Artificial Sequence
  Synthetic
ucaaaggaaagguuaauauu

SEQ ID NO: 822698 - RNA, 20 nt, Artificial Sequence
  Synthetic
ccugugaacaauuuaauauu

SEQ ID NO: 822699 - RNA, 20 nt, Artificial Sequence
  Synthetic
uaaauccccauuuuaauauu

SEQ ID NO: 822700 - RNA, 20 nt, Artificial Sequence
  Synthetic
uugaacucagaaaacauauu

SEQ ID NO: 822701 - RNA, 20 nt, Artificial Sequence
  Synthetic
caauuaaguucaaacauauu

SEQ ID NO: 822702 - RNA, 20 nt, Artificial Sequence
  Synthetic
agccaaugcaacaacauauu

SEQ ID NO: 822703 - RNA, 20 nt, Artificial Sequence
  Synthetic
uuuuaacuucucaacauauu

SEQ ID NO: 822704 - RNA, 20 nt, Artificial Sequence
  Synthetic
uuauuuuacaaacacauauu

SEQ ID NO: 822705 - RNA, 20 nt, Artificial Sequence
  Synthetic
uagucauacuuccacauauu

SEQ ID NO: 822706 - RNA, 20 nt, Artificial Sequence
  Synthetic
acuuguaggcagcacauauu

SEQ ID NO: 822707 - RNA, 20 nt, Artificial Sequence
  Synthetic
uuaaaaagucuucacauauu

SEQ ID NO: 822708 - RNA, 20 nt, Artificial Sequence
  Synthetic
agauacuccacagacauauu

SEQ ID NO: 822709 - RNA, 20 nt, Artificial Sequence
  Synthetic
auaucguuuugagacauauu

SEQ ID NO: 822710 - RNA, 20 nt, Artificial Sequence
  Synthetic
auacucucuucugacauauu

SEQ ID NO: 822711 - RNA, 20 nt, Artificial Sequence
  Synthetic
aaauuauccauuuacauauu

SEQ ID NO: 822712 - RNA, 20 nt, Artificial Sequence
  Synthetic
aucaucaacccaaccauauu

SEQ ID NO: 822713 - RNA, 20 nt, Artificial Sequence
  Synthetic
cucccauuuuagaccauauu

SEQ ID NO: 822714 - RNA, 20 nt, Artificial Sequence
  Synthetic
cucuauguuaucuccauauu

SEQ ID NO: 822715 - RNA, 20 nt, Artificial Sequence
  Synthetic
aacagucucugguccauauu

SEQ ID NO: 822716 - RNA, 20 nt, Artificial Sequence
  Synthetic
auacucaaguuuuccauauu

SEQ ID NO: 822717 - RNA, 20 nt, Artificial Sequence
  Synthetic
uuuuuguucauaagcauauu

SEQ ID NO: 822718 - RNA, 20 nt, Artificial Sequence
  Synthetic
uauauaugugauggcauauu

SEQ ID NO: 822719 - RNA, 20 nt, Artificial Sequence
  Synthetic
uuaagauucuguggcauauu

SEQ ID NO: 822720 - RNA, 20 nt, Artificial Sequence
  Synthetic
uuuuaagugcaaugcauauu

SEQ ID NO: 822721 - RNA, 20 nt, Artificial Sequence
  Synthetic
aucaaagggguaugcauauu

SEQ ID NO: 822722 - RNA, 20 nt, Artificial Sequence
  Synthetic
uauuguaauuuggucauauu

SEQ ID NO: 822723 - RNA, 20 nt, Artificial Sequence
  Synthetic
ucuaacagaugauucauauu

SEQ ID NO: 822724 - RNA, 20 nt, Artificial Sequence
  Synthetic
uucuuguaaacuuucauauu

SEQ ID NO: 822725 - RNA, 20 nt, Artificial Sequence
  Synthetic
augauuagacacaagauauu

SEQ ID NO: 822726 - RNA, 20 nt, Artificial Sequence
  Synthetic
cacuacuguccacagauauu

SEQ ID NO: 822727 - RNA, 20 nt, Artificial Sequence
  Synthetic
cuacaaggugcccagauauu

SEQ ID NO: 822728 - RNA, 20 nt, Artificial Sequence
  Synthetic
ccauugaaacaagagauauu

SEQ ID NO: 822729 - RNA, 20 nt, Artificial Sequence
  Synthetic
uacauaaauggauagauauu

SEQ ID NO: 822730 - RNA, 20 nt, Artificial Sequence
  Synthetic
aaaggccaucucuagauauu

SEQ ID NO: 822731 - RNA, 20 nt, Artificial Sequence
  Synthetic
cuggaauggcaguagauauu

SEQ ID NO: 822732 - RNA, 20 nt, Artificial Sequence
  Synthetic
ucuacugcagauuagauauu

SEQ ID NO: 822733 - RNA, 20 nt, Artificial Sequence
  Synthetic
ucucuuuccaacaugauauu

SEQ ID NO: 822734 - RNA, 20 nt, Artificial Sequence
  Synthetic
cuaggcuaaaccaugauauu

SEQ ID NO: 822735 - RNA, 20 nt, Artificial Sequence
  Synthetic
uaucauuuccugaugauauu

SEQ ID NO: 822736 - RNA, 20 nt, Artificial Sequence
  Synthetic
ugccaacugauuaugauauu

SEQ ID NO: 822737 - RNA, 20 nt, Artificial Sequence
  Synthetic
uugaauauggagcugauauu

SEQ ID NO: 822738 - RNA, 20 nt, Artificial Sequence
  Synthetic
aagugagaacaugugauauu

SEQ ID NO: 822739 - RNA, 20 nt, Artificial Sequence
  Synthetic
uuucauuacaauuugauauu

SEQ ID NO: 822740 - RNA, 20 nt, Artificial Sequence
  Synthetic
uggcaguggacaaauauauu

SEQ ID NO: 822741 - RNA, 20 nt, Artificial Sequence
  Synthetic
auguaccacuguaauauauu

SEQ ID NO: 822742 - RNA, 20 nt, Artificial Sequence
  Synthetic
auuguauucauuaauauauu

SEQ ID NO: 822743 - RNA, 20 nt, Artificial Sequence
  Synthetic
uauuugaucgaagauauauu

SEQ ID NO: 822744 - RNA, 20 nt, Artificial Sequence
  Synthetic
aaaauggacugagauauauu

SEQ ID NO: 822745 - RNA, 20 nt, Artificial Sequence
  Synthetic
aagguaauuauggauauauu

SEQ ID NO: 822746 - RNA, 20 nt, Artificial Sequence
  Synthetic
uaugugauugcugauauauu

SEQ ID NO: 822747 - RNA, 20 nt, Artificial Sequence
  Synthetic
uuauauacuguauauauauu

SEQ ID NO: 822748 - RNA, 20 nt, Artificial Sequence
  Synthetic
cuaaucugaaacuauauauu

SEQ ID NO: 822749 - RNA, 20 nt, Artificial Sequence
  Synthetic
cauuaaguccccuauauauu

SEQ ID NO: 822750 - RNA, 20 nt, Artificial Sequence
  Synthetic
acaaacugugucuauauauu

SEQ ID NO: 822751 - RNA, 20 nt, Artificial Sequence
  Synthetic
ugcugacuuuucuauauauu

SEQ ID NO: 822752 - RNA, 20 nt, Artificial Sequence
  Synthetic
agggaaaaucauuauauauu

SEQ ID NO: 822753 - RNA, 20 nt, Artificial Sequence
  Synthetic
aauccgggugcuccuauauu

SEQ ID NO: 822754 - RNA, 20 nt, Artificial Sequence
  Synthetic
agaguaauaaggaguauauu

SEQ ID NO: 822755 - RNA, 20 nt, Artificial Sequence
  Synthetic
uguggagauucuaguauauu

SEQ ID NO: 822756 - RNA, 20 nt, Artificial Sequence
  Synthetic
auagcuuacauuaguauauu

SEQ ID NO: 822757 - RNA, 20 nt, Artificial Sequence
  Synthetic
agacauuguacauguauauu

SEQ ID NO: 822758 - RNA, 20 nt, Artificial Sequence
  Synthetic
uacagcccucgguguauauu

SEQ ID NO: 822759 - RNA, 20 nt, Artificial Sequence
  Synthetic
uuuagugccucuuguauauu

SEQ ID NO: 822760 - RNA, 20 nt, Artificial Sequence
  Synthetic
ugcauuaugcuuuguauauu

SEQ ID NO: 822761 - RNA, 20 nt, Artificial Sequence
  Synthetic
auauuuagagaaauuauauu

SEQ ID NO: 822762 - RNA, 20 nt, Artificial Sequence
  Synthetic
caaauguuaguaauuauauu

SEQ ID NO: 822763 - RNA, 20 nt, Artificial Sequence
  Synthetic
uuuaauauugcaguuauauu

SEQ ID NO: 822764 - RNA, 20 nt, Artificial Sequence
  Synthetic
ucuagcugcaccuuuauauu

SEQ ID NO: 822765 - RNA, 20 nt, Artificial Sequence
  Synthetic
uuaugugagauuuuuauauu

SEQ ID NO: 822766 - RNA, 20 nt, Artificial Sequence
  Synthetic
uacaaaaaaaaaaaacuauu

SEQ ID NO: 822767 - RNA, 20 nt, Artificial Sequence
  Synthetic
cuagaauucuggaaacuauu

SEQ ID NO: 822768 - RNA, 20 nt, Artificial Sequence
  Synthetic
aucucuaccaaacaacuauu

SEQ ID NO: 822769 - RNA, 20 nt, Artificial Sequence
  Synthetic
auuaugcaaggccaacuauu

SEQ ID NO: 822770 - RNA, 20 nt, Artificial Sequence
  Synthetic
uuacauuugauagaacuauu

SEQ ID NO: 822771 - RNA, 20 nt, Artificial Sequence
  Synthetic
acuaagcaaucugaacuauu

SEQ ID NO: 822772 - RNA, 20 nt, Artificial Sequence
  Synthetic
ucaauuuuuaaaacacuauu

SEQ ID NO: 822773 - RNA, 20 nt, Artificial Sequence
  Synthetic
auaaauaaaucaacacuauu

SEQ ID NO: 822774 - RNA, 20 nt, Artificial Sequence
  Synthetic
caaaaucuugcaccacuauu

SEQ ID NO: 822775 - RNA, 20 nt, Artificial Sequence
  Synthetic
uguucuggauauccacuauu

SEQ ID NO: 822776 - RNA, 20 nt, Artificial Sequence
  Synthetic
uaacaggaaaaaagacuauu

SEQ ID NO: 822777 - RNA, 20 nt, Artificial Sequence
  Synthetic
acaaaaacuaucagacuauu

SEQ ID NO: 822778 - RNA, 20 nt, Artificial Sequence
  Synthetic
uaaaugugacagagacuauu

SEQ ID NO: 822779 - RNA, 20 nt, Artificial Sequence
  Synthetic
ugugcuaauacuauacuauu

SEQ ID NO: 822780 - RNA, 20 nt, Artificial Sequence
  Synthetic
ucuacuguaacacuacuauu

SEQ ID NO: 822781 - RNA, 20 nt, Artificial Sequence
  Synthetic
uuagaaggaaaaguacuauu

SEQ ID NO: 822782 - RNA, 20 nt, Artificial Sequence
  Synthetic
caauacgaaaagguacuauu

SEQ ID NO: 822783 - RNA, 20 nt, Artificial Sequence
  Synthetic
cucccucccuugguacuauu

SEQ ID NO: 822784 - RNA, 20 nt, Artificial Sequence
  Synthetic
aauaauaguauauuacuauu

SEQ ID NO: 822785 - RNA, 20 nt, Artificial Sequence
  Synthetic
cauaucgguuucuuacuauu

SEQ ID NO: 822786 - RNA, 20 nt, Artificial Sequence
  Synthetic
auauuuauuuugaaccuauu

SEQ ID NO: 822787 - RNA, 20 nt, Artificial Sequence
  Synthetic
cauacuggcugccaccuauu

SEQ ID NO: 822788 - RNA, 20 nt, Artificial Sequence
  Synthetic
uuggcugucguuuaccuauu

SEQ ID NO: 822789 - RNA, 20 nt, Artificial Sequence
  Synthetic
ccucagaaugugacccuauu

SEQ ID NO: 822790 - RNA, 20 nt, Artificial Sequence
  Synthetic
ugaggcugccagagccuauu

SEQ ID NO: 822791 - RNA, 20 nt, Artificial Sequence
  Synthetic
cacacuuaaaauagccuauu

SEQ ID NO: 822792 - RNA, 20 nt, Artificial Sequence
  Synthetic
cagcccagaauaugccuauu

SEQ ID NO: 822793 - RNA, 20 nt, Artificial Sequence
  Synthetic
uggauuuuauucugccuauu

SEQ ID NO: 822794 - RNA, 20 nt, Artificial Sequence
  Synthetic
ccaaaccauaucauccuauu

SEQ ID NO: 822795 - RNA, 20 nt, Artificial Sequence
  Synthetic
uuaauagcauugauccuauu

SEQ ID NO: 822796 - RNA, 20 nt, Artificial Sequence
  Synthetic
aagccuugccugguccuauu

SEQ ID NO: 822797 - RNA, 20 nt, Artificial Sequence
  Synthetic
aauaaagaaaacuuccuauu

SEQ ID NO: 822798 - RNA, 20 nt, Artificial Sequence
  Synthetic
uaagaugcugaaaagcuauu

SEQ ID NO: 822799 - RNA, 20 nt, Artificial Sequence
  Synthetic
cuauuugguugaaagcuauu

SEQ ID NO: 822800 - RNA, 20 nt, Artificial Sequence
  Synthetic
ugucuguaaucccagcuauu

SEQ ID NO: 822801 - RNA, 20 nt, Artificial Sequence
  Synthetic
cgccuguagucccagcuauu

SEQ ID NO: 822802 - RNA, 20 nt, Artificial Sequence
  Synthetic
aaacagauacgugagcuauu

SEQ ID NO: 822803 - RNA, 20 nt, Artificial Sequence
  Synthetic
aauccuccuuuuuagcuauu

SEQ ID NO: 822804 - RNA, 20 nt, Artificial Sequence
  Synthetic
ugaauguuauguacgcuauu

SEQ ID NO: 822805 - RNA, 20 nt, Artificial Sequence
  Synthetic
ucaagacuguuuuggcuauu

SEQ ID NO: 822806 - RNA, 20 nt, Artificial Sequence
  Synthetic
ucacaauuguuuuggcuauu

SEQ ID NO: 822807 - RNA, 20 nt, Artificial Sequence
  Synthetic
uggaaagucaugaugcuauu

SEQ ID NO: 822808 - RNA, 20 nt, Artificial Sequence
  Synthetic
aggacaacagaccugcuauu

SEQ ID NO: 822809 - RNA, 20 nt, Artificial Sequence
  Synthetic
uauuuuaauuauaaucuauu

SEQ ID NO: 822810 - RNA, 20 nt, Artificial Sequence
  Synthetic
aaggacaggguggaucuauu

SEQ ID NO: 822811 - RNA, 20 nt, Artificial Sequence
  Synthetic
cuuggccuauaauaucuauu

SEQ ID NO: 822812 - RNA, 20 nt, Artificial Sequence
  Synthetic
uucagguguuuuuaucuauu

SEQ ID NO: 822813 - RNA, 20 nt, Artificial Sequence
  Synthetic
uucgauuuggccacucuauu

SEQ ID NO: 822814 - RNA, 20 nt, Artificial Sequence
  Synthetic
auuauuaguguaccucuauu

SEQ ID NO: 822815 - RNA, 20 nt, Artificial Sequence
  Synthetic
aaaauaguggucccucuauu

SEQ ID NO: 822816 - RNA, 20 nt, Artificial Sequence
  Synthetic
agugagagccugucucuauu

SEQ ID NO: 822817 - RNA, 20 nt, Artificial Sequence
  Synthetic
ugaguaguguuuucucuauu

SEQ ID NO: 822818 - RNA, 20 nt, Artificial Sequence
  Synthetic
aaagaauauguuagucuauu

SEQ ID NO: 822819 - RNA, 20 nt, Artificial Sequence
  Synthetic
uauccaggucucauucuauu

SEQ ID NO: 822820 - RNA, 20 nt, Artificial Sequence
  Synthetic
uaaaagcaguuuauucuauu

SEQ ID NO: 822821 - RNA, 20 nt, Artificial Sequence
  Synthetic
cucuucguguuuauucuauu

SEQ ID NO: 822822 - RNA, 20 nt, Artificial Sequence
  Synthetic
caaaaauaauaucuucuauu

SEQ ID NO: 822823 - RNA, 20 nt, Artificial Sequence
  Synthetic
ucaguuacgucauuucuauu

SEQ ID NO: 822824 - RNA, 20 nt, Artificial Sequence
  Synthetic
cuuuauauucuguuucuauu

SEQ ID NO: 822825 - RNA, 20 nt, Artificial Sequence
  Synthetic
aagcuagauaauuuucuauu

SEQ ID NO: 822826 - RNA, 20 nt, Artificial Sequence
  Synthetic
cccugagauccuuuucuauu

SEQ ID NO: 822827 - RNA, 20 nt, Artificial Sequence
  Synthetic
uuaaaccucaguuuucuauu

SEQ ID NO: 822828 - RNA, 20 nt, Artificial Sequence
  Synthetic
cugacugaaauuuuucuauu

SEQ ID NO: 822829 - RNA, 20 nt, Artificial Sequence
  Synthetic
ugugagucaauuuuucuauu

SEQ ID NO: 822830 - RNA, 20 nt, Artificial Sequence
  Synthetic
uuguuuugauuuuuucuauu

SEQ ID NO: 822831 - RNA, 20 nt, Artificial Sequence
  Synthetic
uuaaacaugaacaaaguauu

SEQ ID NO: 822832 - RNA, 20 nt, Artificial Sequence
  Synthetic
cucagcugaacuaaaguauu

SEQ ID NO: 822833 - RNA, 20 nt, Artificial Sequence
  Synthetic
aucuauaauuaugaaguauu

SEQ ID NO: 822834 - RNA, 20 nt, Artificial Sequence
  Synthetic
auauuuuuccgugaaguauu

SEQ ID NO: 822835 - RNA, 20 nt, Artificial Sequence
  Synthetic
uauggcaauuuugaaguauu

SEQ ID NO: 822836 - RNA, 20 nt, Artificial Sequence
  Synthetic
cuaaaaggaagguaaguauu

SEQ ID NO: 822837 - RNA, 20 nt, Artificial Sequence
  Synthetic
cauauuaaaacaacaguauu

SEQ ID NO: 822838 - RNA, 20 nt, Artificial Sequence
  Synthetic
aagugagaacauacaguauu

SEQ ID NO: 822839 - RNA, 20 nt, Artificial Sequence
  Synthetic
aauauauaaagagcaguauu

SEQ ID NO: 822840 - RNA, 20 nt, Artificial Sequence
  Synthetic
aagugagaacacgcaguauu

SEQ ID NO: 822841 - RNA, 20 nt, Artificial Sequence
  Synthetic
ugauugugcauggcaguauu

SEQ ID NO: 822842 - RNA, 20 nt, Artificial Sequence
  Synthetic
aagugagaacaugcaguauu

SEQ ID NO: 822843 - RNA, 20 nt, Artificial Sequence
  Synthetic
aagcaacucuccagaguauu

SEQ ID NO: 822844 - RNA, 20 nt, Artificial Sequence
  Synthetic
accaucacaauaugaguauu

SEQ ID NO: 822845 - RNA, 20 nt, Artificial Sequence
  Synthetic
aacugaguacauauaguauu

SEQ ID NO: 822846 - RNA, 20 nt, Artificial Sequence
  Synthetic
uaaauccuaucacuaguauu

SEQ ID NO: 822847 - RNA, 20 nt, Artificial Sequence
  Synthetic
accauuaacucucuaguauu

SEQ ID NO: 822848 - RNA, 20 nt, Artificial Sequence
  Synthetic
ucugauuuaauuguaguauu

SEQ ID NO: 822849 - RNA, 20 nt, Artificial Sequence
  Synthetic
uacuaguuuuacuuaguauu

SEQ ID NO: 822850 - RNA, 20 nt, Artificial Sequence
  Synthetic
uucacaauagaguuaguauu

SEQ ID NO: 822851 - RNA, 20 nt, Artificial Sequence
  Synthetic
uaugguagaagguuaguauu

SEQ ID NO: 822852 - RNA, 20 nt, Artificial Sequence
  Synthetic
uuuauguguaguuacguauu

SEQ ID NO: 822853 - RNA, 20 nt, Artificial Sequence
  Synthetic
agcaaauuccacaucguauu

SEQ ID NO: 822854 - RNA, 20 nt, Artificial Sequence
  Synthetic
uucccaggaauuuucguauu

SEQ ID NO: 822855 - RNA, 20 nt, Artificial Sequence
  Synthetic
cuuacagugugcaagguauu

SEQ ID NO: 822856 - RNA, 20 nt, Artificial Sequence
  Synthetic
acuacaaaccaagggguauu

SEQ ID NO: 822857 - RNA, 20 nt, Artificial Sequence
  Synthetic
aaaugagaacaugggguauu

SEQ ID NO: 822858 - RNA, 20 nt, Artificial Sequence
  Synthetic
cacaaucaaauguggguauu

SEQ ID NO: 822859 - RNA, 20 nt, Artificial Sequence
  Synthetic
ucucuucaauaaaugguauu

SEQ ID NO: 822860 - RNA, 20 nt, Artificial Sequence
  Synthetic
acaccuaaggcaaugguauu

SEQ ID NO: 822861 - RNA, 20 nt, Artificial Sequence
  Synthetic
uuuauugcuaccaugguauu

SEQ ID NO: 822862 - RNA, 20 nt, Artificial Sequence
  Synthetic
aagugagaauauaugguauu

SEQ ID NO: 822863 - RNA, 20 nt, Artificial Sequence
  Synthetic
agcuagacacaccugguauu

SEQ ID NO: 822864 - RNA, 20 nt, Artificial Sequence
  Synthetic
ugcuuuucuauucugguauu

SEQ ID NO: 822865 - RNA, 20 nt, Artificial Sequence
  Synthetic
agugagaacaaagugguauu

SEQ ID NO: 822866 - RNA, 20 nt, Artificial Sequence
  Synthetic
acaugagaacacgugguauu

SEQ ID NO: 822867 - RNA, 20 nt, Artificial Sequence
  Synthetic
auugggguacaggugguauu

SEQ ID NO: 822868 - RNA, 20 nt, Artificial Sequence
  Synthetic
uuuucacuguaguugguauu

SEQ ID NO: 822869 - RNA, 20 nt, Artificial Sequence
  Synthetic
ccuuuucugguuuugguauu

SEQ ID NO: 822870 - RNA, 20 nt, Artificial Sequence
  Synthetic
auauuuaauggaaauguauu

SEQ ID NO: 822871 - RNA, 20 nt, Artificial Sequence
  Synthetic
acauauuauggcaauguauu

SEQ ID NO: 822872 - RNA, 20 nt, Artificial Sequence
  Synthetic
cccucccacgaucauguauu

SEQ ID NO: 822873 - RNA, 20 nt, Artificial Sequence
  Synthetic
ucauuuuugcuucauguauu

SEQ ID NO: 822874 - RNA, 20 nt, Artificial Sequence
  Synthetic
caccacaacaaagauguauu

SEQ ID NO: 822875 - RNA, 20 nt, Artificial Sequence
  Synthetic
uauauauauauauauguauu

SEQ ID NO: 822876 - RNA, 20 nt, Artificial Sequence
  Synthetic
cccagcaugaaaacuguauu

SEQ ID NO: 822877 - RNA, 20 nt, Artificial Sequence
  Synthetic
auguuauuauuuacuguauu

SEQ ID NO: 822878 - RNA, 20 nt, Artificial Sequence
  Synthetic
aaucugggugcuccuguauu

SEQ ID NO: 822879 - RNA, 20 nt, Artificial Sequence
  Synthetic
acauaugaaucaucuguauu

SEQ ID NO: 822880 - RNA, 20 nt, Artificial Sequence
  Synthetic
aaauacaaaugaucuguauu

SEQ ID NO: 822881 - RNA, 20 nt, Artificial Sequence
  Synthetic
ugugaggaacuuucuguauu

SEQ ID NO: 822882 - RNA, 20 nt, Artificial Sequence
  Synthetic
caaauuaacaaauguguauu

SEQ ID NO: 822883 - RNA, 20 nt, Artificial Sequence
  Synthetic
uccacauuuucauguguauu

SEQ ID NO: 822884 - RNA, 20 nt, Artificial Sequence
  Synthetic
uagcugugcauguguguauu

SEQ ID NO: 822885 - RNA, 20 nt, Artificial Sequence
  Synthetic
cauagcauuuacauuguauu

SEQ ID NO: 822886 - RNA, 20 nt, Artificial Sequence
  Synthetic
uucuauaguuugauuguauu

SEQ ID NO: 822887 - RNA, 20 nt, Artificial Sequence
  Synthetic
auacaauauggacuuguauu

SEQ ID NO: 822888 - RNA, 20 nt, Artificial Sequence
  Synthetic
ugaacaaauuaucuuguauu

SEQ ID NO: 822889 - RNA, 20 nt, Artificial Sequence
  Synthetic
uguuaauauguuguuguauu

SEQ ID NO: 822890 - RNA, 20 nt, Artificial Sequence
  Synthetic
caucagauuccauuuguauu

SEQ ID NO: 822891 - RNA, 20 nt, Artificial Sequence
  Synthetic
cuaaagauacaaaaauuauu

SEQ ID NO: 822892 - RNA, 20 nt, Artificial Sequence
  Synthetic
uguuaaaaaugcaaauuauu

SEQ ID NO: 822893 - RNA, 20 nt, Artificial Sequence
  Synthetic
ucuccaguauucaaauuauu

SEQ ID NO: 822894 - RNA, 20 nt, Artificial Sequence
  Synthetic
uaacauuguaauaaauuauu

SEQ ID NO: 822895 - RNA, 20 nt, Artificial Sequence
  Synthetic
acagaguaggauaaauuauu

SEQ ID NO: 822896 - RNA, 20 nt, Artificial Sequence
  Synthetic
ugaagauguuauaaauuauu

SEQ ID NO: 822897 - RNA, 20 nt, Artificial Sequence
  Synthetic
uuauuuuucuguaaauuauu

SEQ ID NO: 822898 - RNA, 20 nt, Artificial Sequence
  Synthetic
uaugcuccuaaacaauuauu

SEQ ID NO: 822899 - RNA, 20 nt, Artificial Sequence
  Synthetic
aagaaaccacagcaauuauu

SEQ ID NO: 822900 - RNA, 20 nt, Artificial Sequence
  Synthetic
ccccacaacaaagaauuauu

SEQ ID NO: 822901 - RNA, 20 nt, Artificial Sequence
  Synthetic
auuuucccuguagaauuauu

SEQ ID NO: 822902 - RNA, 20 nt, Artificial Sequence
  Synthetic
uuauuacuaaaauaauuauu

SEQ ID NO: 822903 - RNA, 20 nt, Artificial Sequence
  Synthetic
aaauaaaggucuuaauuauu

SEQ ID NO: 822904 - RNA, 20 nt, Artificial Sequence
  Synthetic
ucuggcuuguuuuaauuauu

SEQ ID NO: 822905 - RNA, 20 nt, Artificial Sequence
  Synthetic
uuaaaacaaaacacauuauu

SEQ ID NO: 822906 - RNA, 20 nt, Artificial Sequence
  Synthetic
acugcauccucaccauuauu

SEQ ID NO: 822907 - RNA, 20 nt, Artificial Sequence
  Synthetic
uuaauuauucucccauuauu

SEQ ID NO: 822908 - RNA, 20 nt, Artificial Sequence
  Synthetic
augggaguucucucauuauu

SEQ ID NO: 822909 - RNA, 20 nt, Artificial Sequence
  Synthetic
auuuguggaaggcgauuauu

SEQ ID NO: 822910 - RNA, 20 nt, Artificial Sequence
  Synthetic
agcaucugguaaugauuauu

SEQ ID NO: 822911 - RNA, 20 nt, Artificial Sequence
  Synthetic
uuauuaccuuuaugauuauu

SEQ ID NO: 822912 - RNA, 20 nt, Artificial Sequence
  Synthetic
uucauacagggaauauuauu

SEQ ID NO: 822913 - RNA, 20 nt, Artificial Sequence
  Synthetic
uuauuccaaaaacuauuauu

SEQ ID NO: 822914 - RNA, 20 nt, Artificial Sequence
  Synthetic
aaaaaauacuagcuauuauu

SEQ ID NO: 822915 - RNA, 20 nt, Artificial Sequence
  Synthetic
uaugcaggccuucuauuauu

SEQ ID NO: 822916 - RNA, 20 nt, Artificial Sequence
  Synthetic
acauauugucuucuauuauu

SEQ ID NO: 822917 - RNA, 20 nt, Artificial Sequence
  Synthetic
aaagaaggaguauuauuauu

SEQ ID NO: 822918 - RNA, 20 nt, Artificial Sequence
  Synthetic
uagaagaaaagcuuauuauu

SEQ ID NO: 822919 - RNA, 20 nt, Artificial Sequence
  Synthetic
uuauaaucuguguuauuauu

SEQ ID NO: 822920 - RNA, 20 nt, Artificial Sequence
  Synthetic
aaacaaaaauguuuauuauu

SEQ ID NO: 822921 - RNA, 20 nt, Artificial Sequence
  Synthetic
ucauuacaguguuuauuauu

SEQ ID NO: 822922 - RNA, 20 nt, Artificial Sequence
  Synthetic
uuuaucaaguuuuuauuauu

SEQ ID NO: 822923 - RNA, 20 nt, Artificial Sequence
  Synthetic
uuggggcauuuuaacuuauu

SEQ ID NO: 822924 - RNA, 20 nt, Artificial Sequence
  Synthetic
uaagaugaaacagacuuauu

SEQ ID NO: 822925 - RNA, 20 nt, Artificial Sequence
  Synthetic
aacuuaauaagagacuuauu

SEQ ID NO: 822926 - RNA, 20 nt, Artificial Sequence
  Synthetic
ugcuaucucccugacuuauu

SEQ ID NO: 822927 - RNA, 20 nt, Artificial Sequence
  Synthetic
cauuucugauuuuacuuauu

SEQ ID NO: 822928 - RNA, 20 nt, Artificial Sequence
  Synthetic
ugugaaaauggaaccuuauu

SEQ ID NO: 822929 - RNA, 20 nt, Artificial Sequence
  Synthetic
cuucaaucugccaccuuauu

SEQ ID NO: 822930 - RNA, 20 nt, Artificial Sequence
  Synthetic
ccaccacacccagccuuauu

SEQ ID NO: 822931 - RNA, 20 nt, Artificial Sequence
  Synthetic
auguucuauaaauccuuauu

SEQ ID NO: 822932 - RNA, 20 nt, Artificial Sequence
  Synthetic
uucaacaugauguccuuauu

SEQ ID NO: 822933 - RNA, 20 nt, Artificial Sequence
  Synthetic
cucacauucauuuccuuauu

SEQ ID NO: 822934 - RNA, 20 nt, Artificial Sequence
  Synthetic
cuaaaauuuuagagcuuauu

SEQ ID NO: 822935 - RNA, 20 nt, Artificial Sequence
  Synthetic
cuaaaauauccaaucuuauu

SEQ ID NO: 822936 - RNA, 20 nt, Artificial Sequence
  Synthetic
cuacucuuucauaucuuauu

SEQ ID NO: 822937 - RNA, 20 nt, Artificial Sequence
  Synthetic
cauaguacuacuaucuuauu

SEQ ID NO: 822938 - RNA, 20 nt, Artificial Sequence
  Synthetic
ccucauggauuuaucuuauu

SEQ ID NO: 822939 - RNA, 20 nt, Artificial Sequence
  Synthetic
aacuuugcuggacucuuauu

SEQ ID NO: 822940 - RNA, 20 nt, Artificial Sequence
  Synthetic
uuuacugaacuccucuuauu

SEQ ID NO: 822941 - RNA, 20 nt, Artificial Sequence
  Synthetic
auguuuuaccuuuucuuauu

SEQ ID NO: 822942 - RNA, 20 nt, Artificial Sequence
  Synthetic
aauauuucauuuuucuuauu

SEQ ID NO: 822943 - RNA, 20 nt, Artificial Sequence
  Synthetic
uaugcugaggaaaaguuauu

SEQ ID NO: 822944 - RNA, 20 nt, Artificial Sequence
  Synthetic
caauucuagacaaaguuauu

SEQ ID NO: 822945 - RNA, 20 nt, Artificial Sequence
  Synthetic
auuauuuccgcaaaguuauu

SEQ ID NO: 822946 - RNA, 20 nt, Artificial Sequence
  Synthetic
agucauauaaacaaguuauu

SEQ ID NO: 822947 - RNA, 20 nt, Artificial Sequence
  Synthetic
uuacugauguagaaguuauu

SEQ ID NO: 822948 - RNA, 20 nt, Artificial Sequence
  Synthetic
aacuuacaaaauaaguuauu

SEQ ID NO: 822949 - RNA, 20 nt, Artificial Sequence
  Synthetic
ugccucuagucccaguuauu

SEQ ID NO: 822950 - RNA, 20 nt, Artificial Sequence
  Synthetic
ugguaacacauucaguuauu

SEQ ID NO: 822951 - RNA, 20 nt, Artificial Sequence
  Synthetic
uuaauaagcuaaccguuauu

SEQ ID NO: 822952 - RNA, 20 nt, Artificial Sequence
  Synthetic
aagguuuaaggaagguuauu

SEQ ID NO: 822953 - RNA, 20 nt, Artificial Sequence
  Synthetic
aauuagauauccugguuauu

SEQ ID NO: 822954 - RNA, 20 nt, Artificial Sequence
  Synthetic
uaucuuggaaggugguuauu

SEQ ID NO: 822955 - RNA, 20 nt, Artificial Sequence
  Synthetic
aaaacugaacagauguuauu

SEQ ID NO: 822956 - RNA, 20 nt, Artificial Sequence
  Synthetic
ugaagcuaauuccuguuauu

SEQ ID NO: 822957 - RNA, 20 nt, Artificial Sequence
  Synthetic
uuaacacuaaggcuguuauu

SEQ ID NO: 822958 - RNA, 20 nt, Artificial Sequence
  Synthetic
aaaucuuguuaucuguuauu

SEQ ID NO: 822959 - RNA, 20 nt, Artificial Sequence
  Synthetic
cuugggauggauguguuauu

SEQ ID NO: 822960 - RNA, 20 nt, Artificial Sequence
  Synthetic
cuucuuagauauguguuauu

SEQ ID NO: 822961 - RNA, 20 nt, Artificial Sequence
  Synthetic
uucaccauuauuguguuauu

SEQ ID NO: 822962 - RNA, 20 nt, Artificial Sequence
  Synthetic
uaacucucaaacuuguuauu

SEQ ID NO: 822963 - RNA, 20 nt, Artificial Sequence
  Synthetic
ugcuuaaaaacuuuguuauu

SEQ ID NO: 822964 - RNA, 20 nt, Artificial Sequence
  Synthetic
aaaagaagugcuuuguuauu

SEQ ID NO: 822965 - RNA, 20 nt, Artificial Sequence
  Synthetic
auaaacaggugaaauuuauu

SEQ ID NO: 822966 - RNA, 20 nt, Artificial Sequence
  Synthetic
uuuugucauucuaauuuauu

SEQ ID NO: 822967 - RNA, 20 nt, Artificial Sequence
  Synthetic
aguuuuucaacacauuuauu

SEQ ID NO: 822968 - RNA, 20 nt, Artificial Sequence
  Synthetic
ucacaguccagacauuuauu

SEQ ID NO: 822969 - RNA, 20 nt, Artificial Sequence
  Synthetic
uuaucacugagacauuuauu

SEQ ID NO: 822970 - RNA, 20 nt, Artificial Sequence
  Synthetic
acuccaauuguacauuuauu

SEQ ID NO: 822971 - RNA, 20 nt, Artificial Sequence
  Synthetic
ucaaacauuuaccauuuauu

SEQ ID NO: 822972 - RNA, 20 nt, Artificial Sequence
  Synthetic
auccuauguaaucauuuauu

SEQ ID NO: 822973 - RNA, 20 nt, Artificial Sequence
  Synthetic
ucauggaacuaucauuuauu

SEQ ID NO: 822974 - RNA, 20 nt, Artificial Sequence
  Synthetic
uaguuuccucaagauuuauu

SEQ ID NO: 822975 - RNA, 20 nt, Artificial Sequence
  Synthetic
cucuucgaaucugauuuauu

SEQ ID NO: 822976 - RNA, 20 nt, Artificial Sequence
  Synthetic
uuaagagcaagugauuuauu

SEQ ID NO: 822977 - RNA, 20 nt, Artificial Sequence
  Synthetic
auaaaaaacagugauuuauu

SEQ ID NO: 822978 - RNA, 20 nt, Artificial Sequence
  Synthetic
aguaguagcaaauauuuauu

SEQ ID NO: 822979 - RNA, 20 nt, Artificial Sequence
  Synthetic
agcagguguauauauuuauu

SEQ ID NO: 822980 - RNA, 20 nt, Artificial Sequence
  Synthetic
uuuauuuuuauauauuuauu

SEQ ID NO: 822981 - RNA, 20 nt, Artificial Sequence
  Synthetic
uuucagacacuaacuuuauu

SEQ ID NO: 822982 - RNA, 20 nt, Artificial Sequence
  Synthetic
uaaaacaaauauacuuuauu

SEQ ID NO: 822983 - RNA, 20 nt, Artificial Sequence
  Synthetic
uacauggccuugccuuuauu

SEQ ID NO: 822984 - RNA, 20 nt, Artificial Sequence
  Synthetic
aaguaucaagaaucuuuauu

SEQ ID NO: 822985 - RNA, 20 nt, Artificial Sequence
  Synthetic
uaacaaagauuaucuuuauu

SEQ ID NO: 822986 - RNA, 20 nt, Artificial Sequence
  Synthetic
acaauccagaguucuuuauu

SEQ ID NO: 822987 - RNA, 20 nt, Artificial Sequence
  Synthetic
ugugccaaugucaguuuauu

SEQ ID NO: 822988 - RNA, 20 nt, Artificial Sequence
  Synthetic
uauguuucagagaguuuauu

SEQ ID NO: 822989 - RNA, 20 nt, Artificial Sequence
  Synthetic
aauguauccaugaguuuauu

SEQ ID NO: 822990 - RNA, 20 nt, Artificial Sequence
  Synthetic
uaaagaauggaagguuuauu

SEQ ID NO: 822991 - RNA, 20 nt, Artificial Sequence
  Synthetic
aucuucucugaggguuuauu

SEQ ID NO: 822992 - RNA, 20 nt, Artificial Sequence
  Synthetic
uaauauuagcuauguuuauu

SEQ ID NO: 822993 - RNA, 20 nt, Artificial Sequence
  Synthetic
acccaagguagcuguuuauu

SEQ ID NO: 822994 - RNA, 20 nt, Artificial Sequence
  Synthetic
aauuuauauauuuguuuauu

SEQ ID NO: 822995 - RNA, 20 nt, Artificial Sequence
  Synthetic
uuauccucaucuauuuuauu

SEQ ID NO: 822996 - RNA, 20 nt, Artificial Sequence
  Synthetic
ugaggcuucaguauuuuauu

SEQ ID NO: 822997 - RNA, 20 nt, Artificial Sequence
  Synthetic
uaugucucaauuauuuuauu

SEQ ID NO: 822998 - RNA, 20 nt, Artificial Sequence
  Synthetic
cuucucagcaaacuuuuauu

SEQ ID NO: 822999 - RNA, 20 nt, Artificial Sequence
  Synthetic
ucauaaaauguacuuuuauu

SEQ ID NO: 823000 - RNA, 20 nt, Artificial Sequence
  Synthetic
uuuugaauuguacuuuuauu

SEQ ID NO: 823001 - RNA, 20 nt, Artificial Sequence
  Synthetic
ucauacuggcuccuuuuauu

SEQ ID NO: 823002 - RNA, 20 nt, Artificial Sequence
  Synthetic
cauuguccccuucuuuuauu

SEQ ID NO: 823003 - RNA, 20 nt, Artificial Sequence
  Synthetic
caguauucuauuguuuuauu

SEQ ID NO: 823004 - RNA, 20 nt, Artificial Sequence
  Synthetic
uuacuuucauaauuuuuauu

SEQ ID NO: 823005 - RNA, 20 nt, Artificial Sequence
  Synthetic
aaucuuaccacauuuuuauu

SEQ ID NO: 823006 - RNA, 20 nt, Artificial Sequence
  Synthetic
cagcauaagucauuuuuauu

SEQ ID NO: 823007 - RNA, 20 nt, Artificial Sequence
  Synthetic
cagagauuacuauuuuuauu

SEQ ID NO: 823008 - RNA, 20 nt, Artificial Sequence
  Synthetic
ugaguuuucguauuuuuauu

SEQ ID NO: 823009 - RNA, 20 nt, Artificial Sequence
  Synthetic
agaaaugagcccuuuuuauu

SEQ ID NO: 823010 - RNA, 20 nt, Artificial Sequence
  Synthetic
uuaauaacacucuuuuuauu

SEQ ID NO: 823011 - RNA, 20 nt, Artificial Sequence
  Synthetic
ugagauaaucucuuuuuauu

SEQ ID NO: 823012 - RNA, 20 nt, Artificial Sequence
  Synthetic
aaaaaaauuuauuuuuuauu

SEQ ID NO: 823013 - RNA, 20 nt, Artificial Sequence
  Synthetic
agcuuagcuacuuuuuuauu

SEQ ID NO: 823014 - RNA, 20 nt, Artificial Sequence
  Synthetic
uauuugcccauuuuuuuauu

SEQ ID NO: 823015 - RNA, 20 nt, Artificial Sequence
  Synthetic
ucaaaaaauguuaaaaacuu

SEQ ID NO: 823016 - RNA, 20 nt, Artificial Sequence
  Synthetic
agcaaacuuuggcaaaacuu

SEQ ID NO: 823017 - RNA, 20 nt, Artificial Sequence
  Synthetic
auuuucaucugagaaaacuu

SEQ ID NO: 823018 - RNA, 20 nt, Artificial Sequence
  Synthetic
acuggauugcuggaaaacuu

SEQ ID NO: 823019 - RNA, 20 nt, Artificial Sequence
  Synthetic
cuacaggaggaauaaaacuu

SEQ ID NO: 823020 - RNA, 20 nt, Artificial Sequence
  Synthetic
caauauuguucguaaaacuu

SEQ ID NO: 823021 - RNA, 20 nt, Artificial Sequence
  Synthetic
ugaaaagcaaggacaaacuu

SEQ ID NO: 823022 - RNA, 20 nt, Artificial Sequence
  Synthetic
ccauuuucaaaagcaaacuu

SEQ ID NO: 823023 - RNA, 20 nt, Artificial Sequence
  Synthetic
uagaaaucgaucucaaacuu

SEQ ID NO: 823024 - RNA, 20 nt, Artificial Sequence
  Synthetic
aagaucagaaagucaaacuu

SEQ ID NO: 823025 - RNA, 20 nt, Artificial Sequence
  Synthetic
uaggcuaagguuagaaacuu

SEQ ID NO: 823026 - RNA, 20 nt, Artificial Sequence
  Synthetic
uguuugaaacauggaaacuu

SEQ ID NO: 823027 - RNA, 20 nt, Artificial Sequence
  Synthetic
ucauccacugauggaaacuu

SEQ ID NO: 823028 - RNA, 20 nt, Artificial Sequence
  Synthetic
cuuugccuuagaugaaacuu

SEQ ID NO: 823029 - RNA, 20 nt, Artificial Sequence
  Synthetic
uuuuauagcuagauaaacuu

SEQ ID NO: 823030 - RNA, 20 nt, Artificial Sequence
  Synthetic
cuaccaaaauggauaaacuu

SEQ ID NO: 823031 - RNA, 20 nt, Artificial Sequence
  Synthetic
acugccaauaguauaaacuu

SEQ ID NO: 823032 - RNA, 20 nt, Artificial Sequence
  Synthetic
uuacuucaaaaaguaaacuu

SEQ ID NO: 823033 - RNA, 20 nt, Artificial Sequence
  Synthetic
auugacuuuucaguaaacuu

SEQ ID NO: 823034 - RNA, 20 nt, Artificial Sequence
  Synthetic
cuauucaaauauuuaaacuu

SEQ ID NO: 823035 - RNA, 20 nt, Artificial Sequence
  Synthetic
auaauaucagcuuuaaacuu

SEQ ID NO: 823036 - RNA, 20 nt, Artificial Sequence
  Synthetic
uaguauguguguuuaaacuu

SEQ ID NO: 823037 - RNA, 20 nt, Artificial Sequence
  Synthetic
aucugugccacucacaacuu

SEQ ID NO: 823038 - RNA, 20 nt, Artificial Sequence
  Synthetic
cuuuauucuugucacaacuu

SEQ ID NO: 823039 - RNA, 20 nt, Artificial Sequence
  Synthetic
auuacucagauugacaacuu

SEQ ID NO: 823040 - RNA, 20 nt, Artificial Sequence
  Synthetic
auauauucuacauacaacuu

SEQ ID NO: 823041 - RNA, 20 nt, Artificial Sequence
  Synthetic
cauuuauugcauuccaacuu

SEQ ID NO: 823042 - RNA, 20 nt, Artificial Sequence
  Synthetic
cuuuggaugucaagcaacuu

SEQ ID NO: 823043 - RNA, 20 nt, Artificial Sequence
  Synthetic
caaaaauguggaagcaacuu

SEQ ID NO: 823044 - RNA, 20 nt, Artificial Sequence
  Synthetic
ugauuggauaagagcaacuu

SEQ ID NO: 823045 - RNA, 20 nt, Artificial Sequence
  Synthetic
auucacuuucuuugcaacuu

SEQ ID NO: 823046 - RNA, 20 nt, Artificial Sequence
  Synthetic
agacauacagagcucaacuu

SEQ ID NO: 823047 - RNA, 20 nt, Artificial Sequence
  Synthetic
ccuuguugggaagucaacuu

SEQ ID NO: 823048 - RNA, 20 nt, Artificial Sequence
  Synthetic
cuaggcagagggaagaacuu

SEQ ID NO: 823049 - RNA, 20 nt, Artificial Sequence
  Synthetic
acaugcauguugaagaacuu

SEQ ID NO: 823050 - RNA, 20 nt, Artificial Sequence
  Synthetic
uauuuuaaauaauagaacuu

SEQ ID NO: 823051 - RNA, 20 nt, Artificial Sequence
  Synthetic
uuuaaagaaucguagaacuu

SEQ ID NO: 823052 - RNA, 20 nt, Artificial Sequence
  Synthetic
auuccaaguacuuagaacuu

SEQ ID NO: 823053 - RNA, 20 nt, Artificial Sequence
  Synthetic
uuggggcugaguuagaacuu

SEQ ID NO: 823054 - RNA, 20 nt, Artificial Sequence
  Synthetic
agagauggcaaaaggaacuu

SEQ ID NO: 823055 - RNA, 20 nt, Artificial Sequence
  Synthetic
aguagggugggcaggaacuu

SEQ ID NO: 823056 - RNA, 20 nt, Artificial Sequence
  Synthetic
ucucacucucuggggaacuu

SEQ ID NO: 823057 - RNA, 20 nt, Artificial Sequence
  Synthetic
agcugcuagucauggaacuu

SEQ ID NO: 823058 - RNA, 20 nt, Artificial Sequence
  Synthetic
uuagacaguaacuggaacuu

SEQ ID NO: 823059 - RNA, 20 nt, Artificial Sequence
  Synthetic
acagagagaauuuggaacuu

SEQ ID NO: 823060 - RNA, 20 nt, Artificial Sequence
  Synthetic
uacaagguacagaugaacuu

SEQ ID NO: 823061 - RNA, 20 nt, Artificial Sequence
  Synthetic
ccuaaaauagggaugaacuu

SEQ ID NO: 823062 - RNA, 20 nt, Artificial Sequence
  Synthetic
aaauaugcugcuaugaacuu

SEQ ID NO: 823063 - RNA, 20 nt, Artificial Sequence
  Synthetic
acuucaaguggagugaacuu

SEQ ID NO: 823064 - RNA, 20 nt, Artificial Sequence
  Synthetic
uguuggauaguggugaacuu

SEQ ID NO: 823065 - RNA, 20 nt, Artificial Sequence
  Synthetic
caggagaauggugugaacuu

SEQ ID NO: 823066 - RNA, 20 nt, Artificial Sequence
  Synthetic
caggagaaucacuugaacuu

SEQ ID NO: 823067 - RNA, 20 nt, Artificial Sequence
  Synthetic
uaccagaaucgcuugaacuu

SEQ ID NO: 823068 - RNA, 20 nt, Artificial Sequence
  Synthetic
uuugcucagagaaauaacuu

SEQ ID NO: 823069 - RNA, 20 nt, Artificial Sequence
  Synthetic
ugauuuuuauucaauaacuu

SEQ ID NO: 823070 - RNA, 20 nt, Artificial Sequence
  Synthetic
auaucagcugauaauaacuu

SEQ ID NO: 823071 - RNA, 20 nt, Artificial Sequence
  Synthetic
uugaagccuugacauaacuu

SEQ ID NO: 823072 - RNA, 20 nt, Artificial Sequence
  Synthetic
aaaauccuccaggauaacuu

SEQ ID NO: 823073 - RNA, 20 nt, Artificial Sequence
  Synthetic
ugcaguucuuaauauaacuu

SEQ ID NO: 823074 - RNA, 20 nt, Artificial Sequence
  Synthetic
uuagguaacuuauauaacuu

SEQ ID NO: 823075 - RNA, 20 nt, Artificial Sequence
  Synthetic
uaaaauuacuauuauaacuu

SEQ ID NO: 823076 - RNA, 20 nt, Artificial Sequence
  Synthetic
uuuuauggauguuauaacuu

SEQ ID NO: 823077 - RNA, 20 nt, Artificial Sequence
  Synthetic
uuuauaauauguuauaacuu

SEQ ID NO: 823078 - RNA, 20 nt, Artificial Sequence
  Synthetic
ucaccaagauuuuauaacuu

SEQ ID NO: 823079 - RNA, 20 nt, Artificial Sequence
  Synthetic
aauggauaaaauacuaacuu

SEQ ID NO: 823080 - RNA, 20 nt, Artificial Sequence
  Synthetic
cuuguaguccuggcuaacuu

SEQ ID NO: 823081 - RNA, 20 nt, Artificial Sequence
  Synthetic
uuccuucccucugcuaacuu

SEQ ID NO: 823082 - RNA, 20 nt, Artificial Sequence
  Synthetic
uuucuucuuucugcuaacuu

SEQ ID NO: 823083 - RNA, 20 nt, Artificial Sequence
  Synthetic
aguugcugguccaguaacuu

SEQ ID NO: 823084 - RNA, 20 nt, Artificial Sequence
  Synthetic
cuucuaggaauaauuaacuu

SEQ ID NO: 823085 - RNA, 20 nt, Artificial Sequence
  Synthetic
caagugguuaacauuaacuu

SEQ ID NO: 823086 - RNA, 20 nt, Artificial Sequence
  Synthetic
uaagagacauuuguuaacuu

SEQ ID NO: 823087 - RNA, 20 nt, Artificial Sequence
  Synthetic
aggcuauaauucuuuaacuu

SEQ ID NO: 823088 - RNA, 20 nt, Artificial Sequence
  Synthetic
ucuuaaguuuucuuuaacuu

SEQ ID NO: 823089 - RNA, 20 nt, Artificial Sequence
  Synthetic
aaaacaaaacaaaaacacuu

SEQ ID NO: 823090 - RNA, 20 nt, Artificial Sequence
  Synthetic
agagggaguacaaaacacuu

SEQ ID NO: 823091 - RNA, 20 nt, Artificial Sequence
  Synthetic
aucccuuauccaaaacacuu

SEQ ID NO: 823092 - RNA, 20 nt, Artificial Sequence
  Synthetic
cuuccgcauuuaaaacacuu

SEQ ID NO: 823093 - RNA, 20 nt, Artificial Sequence
  Synthetic
caccuauaaucccaacacuu

SEQ ID NO: 823094 - RNA, 20 nt, Artificial Sequence
  Synthetic
cgccuguaaucccaacacuu

SEQ ID NO: 823095 - RNA, 20 nt, Artificial Sequence
  Synthetic
ugcuuguaaucccaacacuu

SEQ ID NO: 823096 - RNA, 20 nt, Artificial Sequence
  Synthetic
cgccucuacucccaacacuu

SEQ ID NO: 823097 - RNA, 20 nt, Artificial Sequence
  Synthetic
aaauuagauuaucaacacuu

SEQ ID NO: 823098 - RNA, 20 nt, Artificial Sequence
  Synthetic
caccuguaaucucaacacuu

SEQ ID NO: 823099 - RNA, 20 nt, Artificial Sequence
  Synthetic
uacgugcuucaugaacacuu

SEQ ID NO: 823100 - RNA, 20 nt, Artificial Sequence
  Synthetic
uuuccaaauucugaacacuu

SEQ ID NO: 823101 - RNA, 20 nt, Artificial Sequence
  Synthetic
caccuguaauccuaacacuu

SEQ ID NO: 823102 - RNA, 20 nt, Artificial Sequence
  Synthetic
aauggaaaugugccacacuu

SEQ ID NO: 823103 - RNA, 20 nt, Artificial Sequence
  Synthetic
ucauuggucgauggacacuu

SEQ ID NO: 823104 - RNA, 20 nt, Artificial Sequence
  Synthetic
ucaucuacugauggacacuu

SEQ ID NO: 823105 - RNA, 20 nt, Artificial Sequence
  Synthetic
uccuagugugaaugacacuu

SEQ ID NO: 823106 - RNA, 20 nt, Artificial Sequence
  Synthetic
acaguggucugcugacacuu

SEQ ID NO: 823107 - RNA, 20 nt, Artificial Sequence
  Synthetic
uaagguauagaaauacacuu

SEQ ID NO: 823108 - RNA, 20 nt, Artificial Sequence
  Synthetic
aaucucaauauuauacacuu

SEQ ID NO: 823109 - RNA, 20 nt, Artificial Sequence
  Synthetic
aaaaguuuugaccuacacuu

SEQ ID NO: 823110 - RNA, 20 nt, Artificial Sequence
  Synthetic
aauuuuaccuuuguacacuu

SEQ ID NO: 823111 - RNA, 20 nt, Artificial Sequence
  Synthetic
cgccuguaaucccaccacuu

SEQ ID NO: 823112 - RNA, 20 nt, Artificial Sequence
  Synthetic
uugugacaggaugaccacuu

SEQ ID NO: 823113 - RNA, 20 nt, Artificial Sequence
  Synthetic
acagagcagcaguaccacuu

SEQ ID NO: 823114 - RNA, 20 nt, Artificial Sequence
  Synthetic
accucgugguccgcccacuu

SEQ ID NO: 823115 - RNA, 20 nt, Artificial Sequence
  Synthetic
cucaagugauccucccacuu

SEQ ID NO: 823116 - RNA, 20 nt, Artificial Sequence
  Synthetic
uguacuugcaucucccacuu

SEQ ID NO: 823117 - RNA, 20 nt, Artificial Sequence
  Synthetic
uuguuuugcuucagccacuu

SEQ ID NO: 823118 - RNA, 20 nt, Artificial Sequence
  Synthetic
aggugguuaaugagccacuu

SEQ ID NO: 823119 - RNA, 20 nt, Artificial Sequence
  Synthetic
uacucucaauuuagccacuu

SEQ ID NO: 823120 - RNA, 20 nt, Artificial Sequence
  Synthetic
aucagugcuguaauccacuu

SEQ ID NO: 823121 - RNA, 20 nt, Artificial Sequence
  Synthetic
uuguuaggaaagauccacuu

SEQ ID NO: 823122 - RNA, 20 nt, Artificial Sequence
  Synthetic
agguucccugaauuccacuu

SEQ ID NO: 823123 - RNA, 20 nt, Artificial Sequence
  Synthetic
ugggcauguacauuccacuu

SEQ ID NO: 823124 - RNA, 20 nt, Artificial Sequence
  Synthetic
aaccauacugcauuccacuu

SEQ ID NO: 823125 - RNA, 20 nt, Artificial Sequence
  Synthetic
aaggacucuuacuuccacuu

SEQ ID NO: 823126 - RNA, 20 nt, Artificial Sequence
  Synthetic
ucucacucagaaaagcacuu

SEQ ID NO: 823127 - RNA, 20 nt, Artificial Sequence
  Synthetic
cgccuguaauccaagcacuu

SEQ ID NO: 823128 - RNA, 20 nt, Artificial Sequence
  Synthetic
cgccuguaauaccagcacuu

SEQ ID NO: 823129 - RNA, 20 nt, Artificial Sequence
  Synthetic
ugccuguaauaccagcacuu

SEQ ID NO: 823130 - RNA, 20 nt, Artificial Sequence
  Synthetic
cgccuguaaacccagcacuu

SEQ ID NO: 823131 - RNA, 20 nt, Artificial Sequence
  Synthetic
ugccuguaaccccagcacuu

SEQ ID NO: 823132 - RNA, 20 nt, Artificial Sequence
  Synthetic
cgucugcaaucccagcacuu

SEQ ID NO: 823133 - RNA, 20 nt, Artificial Sequence
  Synthetic
uccccauaaucccagcacuu

SEQ ID NO: 823134 - RNA, 20 nt, Artificial Sequence
  Synthetic
ugcauauaaucccagcacuu

SEQ ID NO: 823135 - RNA, 20 nt, Artificial Sequence
  Synthetic
caccuauaaucccagcacuu

SEQ ID NO: 823136 - RNA, 20 nt, Artificial Sequence
  Synthetic
cgccuauaaucccagcacuu

SEQ ID NO: 823137 - RNA, 20 nt, Artificial Sequence
  Synthetic
cuccuauaaucccagcacuu

SEQ ID NO: 823138 - RNA, 20 nt, Artificial Sequence
  Synthetic
caccaguaaucccagcacuu

SEQ ID NO: 823139 - RNA, 20 nt, Artificial Sequence
  Synthetic
ugcccguaaucccagcacuu

SEQ ID NO: 823140 - RNA, 20 nt, Artificial Sequence
  Synthetic
agacuguaaucccagcacuu

SEQ ID NO: 823141 - RNA, 20 nt, Artificial Sequence
  Synthetic
caccuguaaucccagcacuu

SEQ ID NO: 823142 - RNA, 20 nt, Artificial Sequence
  Synthetic
uaccuguaaucccagcacuu

SEQ ID NO: 823143 - RNA, 20 nt, Artificial Sequence
  Synthetic
agccuguaaucccagcacuu

SEQ ID NO: 823144 - RNA, 20 nt, Artificial Sequence
  Synthetic
cgccuguaaucccagcacuu

SEQ ID NO: 823145 - RNA, 20 nt, Artificial Sequence
  Synthetic
ugccuguaaucccagcacuu

SEQ ID NO: 823146 - RNA, 20 nt, Artificial Sequence
  Synthetic
ugucuguaaucccagcacuu

SEQ ID NO: 823147 - RNA, 20 nt, Artificial Sequence
  Synthetic
acgccuguaucccagcacuu

SEQ ID NO: 823148 - RNA, 20 nt, Artificial Sequence
  Synthetic
caccuguacucccagcacuu

SEQ ID NO: 823149 - RNA, 20 nt, Artificial Sequence
  Synthetic
cuccuguaauuccagcacuu

SEQ ID NO: 823150 - RNA, 20 nt, Artificial Sequence
  Synthetic
cgccuguaaucgcagcacuu

SEQ ID NO: 823151 - RNA, 20 nt, Artificial Sequence
  Synthetic
cgccuguaaucucagcacuu

SEQ ID NO: 823152 - RNA, 20 nt, Artificial Sequence
  Synthetic
ugccuguaaucucagcacuu

SEQ ID NO: 823153 - RNA, 20 nt, Artificial Sequence
  Synthetic
ccugggacuccagagcacuu

SEQ ID NO: 823154 - RNA, 20 nt, Artificial Sequence
  Synthetic
ugccuauaauccuagcacuu

SEQ ID NO: 823155 - RNA, 20 nt, Artificial Sequence
  Synthetic
cgccuguaauccuagcacuu

SEQ ID NO: 823156 - RNA, 20 nt, Artificial Sequence
  Synthetic
ugccuaugauccuagcacuu

SEQ ID NO: 823157 - RNA, 20 nt, Artificial Sequence
  Synthetic
cgucugugauuuuagcacuu

SEQ ID NO: 823158 - RNA, 20 nt, Artificial Sequence
  Synthetic
auugucuaguuuuagcacuu

SEQ ID NO: 823159 - RNA, 20 nt, Artificial Sequence
  Synthetic
aacgauaauaaaacgcacuu

SEQ ID NO: 823160 - RNA, 20 nt, Artificial Sequence
  Synthetic
ucagguggcaggacgcacuu

SEQ ID NO: 823161 - RNA, 20 nt, Artificial Sequence
  Synthetic
cgccuguaauccccgcacuu

SEQ ID NO: 823162 - RNA, 20 nt, Artificial Sequence
  Synthetic
ugccuguaauccccgcacuu

SEQ ID NO: 823163 - RNA, 20 nt, Artificial Sequence
  Synthetic
ccagcagcaaacaggcacuu

SEQ ID NO: 823164 - RNA, 20 nt, Artificial Sequence
  Synthetic
cuacuguauacuaggcacuu

SEQ ID NO: 823165 - RNA, 20 nt, Artificial Sequence
  Synthetic
aacuaaaaaauuaggcacuu

SEQ ID NO: 823166 - RNA, 20 nt, Artificial Sequence
  Synthetic
ucauuggucggcuggcacuu

SEQ ID NO: 823167 - RNA, 20 nt, Artificial Sequence
  Synthetic
uuuuguguugucuggcacuu

SEQ ID NO: 823168 - RNA, 20 nt, Artificial Sequence
  Synthetic
uuauuugcuuucuggcacuu

SEQ ID NO: 823169 - RNA, 20 nt, Artificial Sequence
  Synthetic
uuccuuuuguguaugcacuu

SEQ ID NO: 823170 - RNA, 20 nt, Artificial Sequence
  Synthetic
ugaauaaauaaacugcacuu

SEQ ID NO: 823171 - RNA, 20 nt, Artificial Sequence
  Synthetic
ugaaaugaagcuuugcacuu

SEQ ID NO: 823172 - RNA, 20 nt, Artificial Sequence
  Synthetic
uuuaauucuuuuuugcacuu

SEQ ID NO: 823173 - RNA, 20 nt, Artificial Sequence
  Synthetic
cagccauguccuaaucacuu

SEQ ID NO: 823174 - RNA, 20 nt, Artificial Sequence
  Synthetic
cuagcagccccacaucacuu

SEQ ID NO: 823175 - RNA, 20 nt, Artificial Sequence
  Synthetic
cagcagcguuagcaucacuu

SEQ ID NO: 823176 - RNA, 20 nt, Artificial Sequence
  Synthetic
uagcaguaucggcaucacuu

SEQ ID NO: 823177 - RNA, 20 nt, Artificial Sequence
  Synthetic
cagcaaaagaaggaucacuu

SEQ ID NO: 823178 - RNA, 20 nt, Artificial Sequence
  Synthetic
aaagaucacccauaucacuu

SEQ ID NO: 823179 - RNA, 20 nt, Artificial Sequence
  Synthetic
uugaaaggaguauaucacuu

SEQ ID NO: 823180 - RNA, 20 nt, Artificial Sequence
  Synthetic
auaaauguaguuuaucacuu

SEQ ID NO: 823181 - RNA, 20 nt, Artificial Sequence
  Synthetic
auaaaagaugucccucacuu

SEQ ID NO: 823182 - RNA, 20 nt, Artificial Sequence
  Synthetic
ccuuuguccaguccucacuu

SEQ ID NO: 823183 - RNA, 20 nt, Artificial Sequence
  Synthetic
auuuuaccaaaugcucacuu

SEQ ID NO: 823184 - RNA, 20 nt, Artificial Sequence
  Synthetic
uaaaacauuuguucucacuu

SEQ ID NO: 823185 - RNA, 20 nt, Artificial Sequence
  Synthetic
aucugauaaauaagucacuu

SEQ ID NO: 823186 - RNA, 20 nt, Artificial Sequence
  Synthetic
cuguuaauacccugucacuu

SEQ ID NO: 823187 - RNA, 20 nt, Artificial Sequence
  Synthetic
auuacaauuauuugucacuu

SEQ ID NO: 823188 - RNA, 20 nt, Artificial Sequence
  Synthetic
aacuguguaauaauucacuu

SEQ ID NO: 823189 - RNA, 20 nt, Artificial Sequence
  Synthetic
uuuuaaccugccauucacuu

SEQ ID NO: 823190 - RNA, 20 nt, Artificial Sequence
  Synthetic
uuagaauuucaucuucacuu

SEQ ID NO: 823191 - RNA, 20 nt, Artificial Sequence
  Synthetic
cugggggcaaagguucacuu

SEQ ID NO: 823192 - RNA, 20 nt, Artificial Sequence
  Synthetic
ugguuuggugcauuucacuu

SEQ ID NO: 823193 - RNA, 20 nt, Artificial Sequence
  Synthetic
ugugcacauuauuuucacuu

SEQ ID NO: 823194 - RNA, 20 nt, Artificial Sequence
  Synthetic
aauuuuucacaaaaagacuu

SEQ ID NO: 823195 - RNA, 20 nt, Artificial Sequence
  Synthetic
uugccaucugagaaagacuu

SEQ ID NO: 823196 - RNA, 20 nt, Artificial Sequence
  Synthetic
ucuuucuugaugaaagacuu

SEQ ID NO: 823197 - RNA, 20 nt, Artificial Sequence
  Synthetic
caguguugaacacaagacuu

SEQ ID NO: 823198 - RNA, 20 nt, Artificial Sequence
  Synthetic
uuuucuagaaugcaagacuu

SEQ ID NO: 823199 - RNA, 20 nt, Artificial Sequence
  Synthetic
uaaaguuuauuggaagacuu

SEQ ID NO: 823200 - RNA, 20 nt, Artificial Sequence
  Synthetic
cacaaagagaaugaagacuu

SEQ ID NO: 823201 - RNA, 20 nt, Artificial Sequence
  Synthetic
acuugccuaccauaagacuu

SEQ ID NO: 823202 - RNA, 20 nt, Artificial Sequence
  Synthetic
aggagggauuacuaagacuu

SEQ ID NO: 823203 - RNA, 20 nt, Artificial Sequence
  Synthetic
uagaguugcuucuaagacuu

SEQ ID NO: 823204 - RNA, 20 nt, Artificial Sequence
  Synthetic
aucugcuuuaagacagacuu

SEQ ID NO: 823205 - RNA, 20 nt, Artificial Sequence
  Synthetic
uucaagcauuuuacagacuu

SEQ ID NO: 823206 - RNA, 20 nt, Artificial Sequence
  Synthetic
aaaacagguuuaccagacuu

SEQ ID NO: 823207 - RNA, 20 nt, Artificial Sequence
  Synthetic
auucagaaauaagcagacuu

SEQ ID NO: 823208 - RNA, 20 nt, Artificial Sequence
  Synthetic
ccacucuggacaucagacuu

SEQ ID NO: 823209 - RNA, 20 nt, Artificial Sequence
  Synthetic
uccaaagugcugucagacuu

SEQ ID NO: 823210 - RNA, 20 nt, Artificial Sequence
  Synthetic
uggauaggaauaagagacuu

SEQ ID NO: 823211 - RNA, 20 nt, Artificial Sequence
  Synthetic
ccaauguauccuagagacuu

SEQ ID NO: 823212 - RNA, 20 nt, Artificial Sequence
  Synthetic
cccauuucaacaggagacuu

SEQ ID NO: 823213 - RNA, 20 nt, Artificial Sequence
  Synthetic
acaaugggcuuuggagacuu

SEQ ID NO: 823214 - RNA, 20 nt, Artificial Sequence
  Synthetic
ccuugucucagaugagacuu

SEQ ID NO: 823215 - RNA, 20 nt, Artificial Sequence
  Synthetic
aaaugagaaaacugagacuu

SEQ ID NO: 823216 - RNA, 20 nt, Artificial Sequence
  Synthetic
uuucccuaauuuugagacuu

SEQ ID NO: 823217 - RNA, 20 nt, Artificial Sequence
  Synthetic
caauauguauaaauagacuu

SEQ ID NO: 823218 - RNA, 20 nt, Artificial Sequence
  Synthetic
uccaaggcuaggauagacuu

SEQ ID NO: 823219 - RNA, 20 nt, Artificial Sequence
  Synthetic
uucagauugauuauagacuu

SEQ ID NO: 823220 - RNA, 20 nt, Artificial Sequence
  Synthetic
auguggacagggcuagacuu

SEQ ID NO: 823221 - RNA, 20 nt, Artificial Sequence
  Synthetic
agagucuguaccuuagacuu

SEQ ID NO: 823222 - RNA, 20 nt, Artificial Sequence
  Synthetic
agaguuagauuuaacgacuu

SEQ ID NO: 823223 - RNA, 20 nt, Artificial Sequence
  Synthetic
cgaaaauguggaagcgacuu

SEQ ID NO: 823224 - RNA, 20 nt, Artificial Sequence
  Synthetic
auaaacuuucucaaggacuu

SEQ ID NO: 823225 - RNA, 20 nt, Artificial Sequence
  Synthetic
cucuucaccaguaaggacuu

SEQ ID NO: 823226 - RNA, 20 nt, Artificial Sequence
  Synthetic
cgccuguaaucccaggacuu

SEQ ID NO: 823227 - RNA, 20 nt, Artificial Sequence
  Synthetic
ugccuguaaucccaggacuu

SEQ ID NO: 823228 - RNA, 20 nt, Artificial Sequence
  Synthetic
acgcuguaaucccaggacuu

SEQ ID NO: 823229 - RNA, 20 nt, Artificial Sequence
  Synthetic
cagggccuggaugaggacuu

SEQ ID NO: 823230 - RNA, 20 nt, Artificial Sequence
  Synthetic
cgucuguaacccuaggacuu

SEQ ID NO: 823231 - RNA, 20 nt, Artificial Sequence
  Synthetic
uuuggggucuauuaggacuu

SEQ ID NO: 823232 - RNA, 20 nt, Artificial Sequence
  Synthetic
acauuuuucucuuaggacuu

SEQ ID NO: 823233 - RNA, 20 nt, Artificial Sequence
  Synthetic
aaaccuacacaaagggacuu

SEQ ID NO: 823234 - RNA, 20 nt, Artificial Sequence
  Synthetic
ucugggucgaguggggacuu

SEQ ID NO: 823235 - RNA, 20 nt, Artificial Sequence
  Synthetic
aaucucuggggaugggacuu

SEQ ID NO: 823236 - RNA, 20 nt, Artificial Sequence
  Synthetic
auugguguucugugggacuu

SEQ ID NO: 823237 - RNA, 20 nt, Artificial Sequence
  Synthetic
cggagugauacaauggacuu

SEQ ID NO: 823238 - RNA, 20 nt, Artificial Sequence
  Synthetic
auccaauaauacauggacuu

SEQ ID NO: 823239 - RNA, 20 nt, Artificial Sequence
  Synthetic
uaauguaauacauuggacuu

SEQ ID NO: 823240 - RNA, 20 nt, Artificial Sequence
  Synthetic
uaaugccaaguguuggacuu

SEQ ID NO: 823241 - RNA, 20 nt, Artificial Sequence
  Synthetic
caugacaaagaacaugacuu

SEQ ID NO: 823242 - RNA, 20 nt, Artificial Sequence
  Synthetic
cuaaccaaauuacaugacuu

SEQ ID NO: 823243 - RNA, 20 nt, Artificial Sequence
  Synthetic
ucauuuugauagcaugacuu

SEQ ID NO: 823244 - RNA, 20 nt, Artificial Sequence
  Synthetic
aaauacccuuuugaugacuu

SEQ ID NO: 823245 - RNA, 20 nt, Artificial Sequence
  Synthetic
uucaacagcuuauaugacuu

SEQ ID NO: 823246 - RNA, 20 nt, Artificial Sequence
  Synthetic
ugggauaccuagucugacuu

SEQ ID NO: 823247 - RNA, 20 nt, Artificial Sequence
  Synthetic
aagcaagugacuucugacuu

SEQ ID NO: 823248 - RNA, 20 nt, Artificial Sequence
  Synthetic
uaaaaugaaaucggugacuu

SEQ ID NO: 823249 - RNA, 20 nt, Artificial Sequence
  Synthetic
auucugggaaacugugacuu

SEQ ID NO: 823250 - RNA, 20 nt, Artificial Sequence
  Synthetic
acuucccuucccauugacuu

SEQ ID NO: 823251 - RNA, 20 nt, Artificial Sequence
  Synthetic
auuuuccuaccccuugacuu

SEQ ID NO: 823252 - RNA, 20 nt, Artificial Sequence
  Synthetic
auguuucuaccaguugacuu

SEQ ID NO: 823253 - RNA, 20 nt, Artificial Sequence
  Synthetic
aaguguucaagauuugacuu

SEQ ID NO: 823254 - RNA, 20 nt, Artificial Sequence
  Synthetic
aauuauguuuccuuugacuu

SEQ ID NO: 823255 - RNA, 20 nt, Artificial Sequence
  Synthetic
cauuuuacauucuuugacuu

SEQ ID NO: 823256 - RNA, 20 nt, Artificial Sequence
  Synthetic
ugaggagaaaaaaaauacuu

SEQ ID NO: 823257 - RNA, 20 nt, Artificial Sequence
  Synthetic
aauggguacaaaaaauacuu

SEQ ID NO: 823258 - RNA, 20 nt, Artificial Sequence
  Synthetic
uacuucaccugaaaauacuu

SEQ ID NO: 823259 - RNA, 20 nt, Artificial Sequence
  Synthetic
ccccaaaaugugaaauacuu

SEQ ID NO: 823260 - RNA, 20 nt, Artificial Sequence
  Synthetic
aguaucaauuuuaaauacuu

SEQ ID NO: 823261 - RNA, 20 nt, Artificial Sequence
  Synthetic
aacgauuacagaacauacuu

SEQ ID NO: 823262 - RNA, 20 nt, Artificial Sequence
  Synthetic
cuacuuuaguacacauacuu

SEQ ID NO: 823263 - RNA, 20 nt, Artificial Sequence
  Synthetic
uuggccugcagaccauacuu

SEQ ID NO: 823264 - RNA, 20 nt, Artificial Sequence
  Synthetic
ccagucagaggaccauacuu

SEQ ID NO: 823265 - RNA, 20 nt, Artificial Sequence
  Synthetic
auuuuauuuuuuucauacuu

SEQ ID NO: 823266 - RNA, 20 nt, Artificial Sequence
  Synthetic
aucacaguaucaugauacuu

SEQ ID NO: 823267 - RNA, 20 nt, Artificial Sequence
  Synthetic
cauacuaaaagaugauacuu

SEQ ID NO: 823268 - RNA, 20 nt, Artificial Sequence
  Synthetic
uugaaauaguaaauauacuu

SEQ ID NO: 823269 - RNA, 20 nt, Artificial Sequence
  Synthetic
ucaguguauauaauauacuu

SEQ ID NO: 823270 - RNA, 20 nt, Artificial Sequence
  Synthetic
aauugcauauuccuauacuu

SEQ ID NO: 823271 - RNA, 20 nt, Artificial Sequence
  Synthetic
aaaguugucagucuauacuu

SEQ ID NO: 823272 - RNA, 20 nt, Artificial Sequence
  Synthetic
uuuuguguaguaguauacuu

SEQ ID NO: 823273 - RNA, 20 nt, Artificial Sequence
  Synthetic
uuauauccuugauuauacuu

SEQ ID NO: 823274 - RNA, 20 nt, Artificial Sequence
  Synthetic
ucugugggaaaguuauacuu

SEQ ID NO: 823275 - RNA, 20 nt, Artificial Sequence
  Synthetic
uccauuguugcuuuauacuu

SEQ ID NO: 823276 - RNA, 20 nt, Artificial Sequence
  Synthetic
uucccuuuaauuuuauacuu

SEQ ID NO: 823277 - RNA, 20 nt, Artificial Sequence
  Synthetic
uuaacggcuuuuuuauacuu

SEQ ID NO: 823278 - RNA, 20 nt, Artificial Sequence
  Synthetic
uucuuaccaguuaacuacuu

SEQ ID NO: 823279 - RNA, 20 nt, Artificial Sequence
  Synthetic
cucaagugauccaccuacuu

SEQ ID NO: 823280 - RNA, 20 nt, Artificial Sequence
  Synthetic
uuucccucuuauaccuacuu

SEQ ID NO: 823281 - RNA, 20 nt, Artificial Sequence
  Synthetic
aagucuuggguucccuacuu

SEQ ID NO: 823282 - RNA, 20 nt, Artificial Sequence
  Synthetic
auggucacuacugccuacuu

SEQ ID NO: 823283 - RNA, 20 nt, Artificial Sequence
  Synthetic
accuguaaucccagcuacuu

SEQ ID NO: 823284 - RNA, 20 nt, Artificial Sequence
  Synthetic
cccuguaaucccagcuacuu

SEQ ID NO: 823285 - RNA, 20 nt, Artificial Sequence
  Synthetic
aucugugaucccagcuacuu

SEQ ID NO: 823286 - RNA, 20 nt, Artificial Sequence
  Synthetic
caccuguaucccagcuacuu

SEQ ID NO: 823287 - RNA, 20 nt, Artificial Sequence
  Synthetic
accuguaaucucagcuacuu

SEQ ID NO: 823288 - RNA, 20 nt, Artificial Sequence
  Synthetic
accuguagucucagcuacuu

SEQ ID NO: 823289 - RNA, 20 nt, Artificial Sequence
  Synthetic
agaaauagucuuagcuacuu

SEQ ID NO: 823290 - RNA, 20 nt, Artificial Sequence
  Synthetic
ucuugguaggcaaucuacuu

SEQ ID NO: 823291 - RNA, 20 nt, Artificial Sequence
  Synthetic
cgaaauuauuacuucuacuu

SEQ ID NO: 823292 - RNA, 20 nt, Artificial Sequence
  Synthetic
uuaaauaaucauuucuacuu

SEQ ID NO: 823293 - RNA, 20 nt, Artificial Sequence
  Synthetic
aacaucuuuuuaaaguacuu

SEQ ID NO: 823294 - RNA, 20 nt, Artificial Sequence
  Synthetic
ugcuccuuuaucaaguacuu

SEQ ID NO: 823295 - RNA, 20 nt, Artificial Sequence
  Synthetic
agccuguaaucccaguacuu

SEQ ID NO: 823296 - RNA, 20 nt, Artificial Sequence
  Synthetic
acaaaucuguuccaguacuu

SEQ ID NO: 823297 - RNA, 20 nt, Artificial Sequence
  Synthetic
caccuguaauccuaguacuu

SEQ ID NO: 823298 - RNA, 20 nt, Artificial Sequence
  Synthetic
accuauuaucccagguacuu

SEQ ID NO: 823299 - RNA, 20 nt, Artificial Sequence
  Synthetic
augauauaugccagguacuu

SEQ ID NO: 823300 - RNA, 20 nt, Artificial Sequence
  Synthetic
ucuacuuaauuccuguacuu

SEQ ID NO: 823301 - RNA, 20 nt, Artificial Sequence
  Synthetic
caacagccugagcuguacuu

SEQ ID NO: 823302 - RNA, 20 nt, Artificial Sequence
  Synthetic
uccuugcuuuaauuguacuu

SEQ ID NO: 823303 - RNA, 20 nt, Artificial Sequence
  Synthetic
uuacaagaauuguuguacuu

SEQ ID NO: 823304 - RNA, 20 nt, Artificial Sequence
  Synthetic
aagcuaaaagcaaauuacuu

SEQ ID NO: 823305 - RNA, 20 nt, Artificial Sequence
  Synthetic
auugaaucuauaaauuacuu

SEQ ID NO: 823306 - RNA, 20 nt, Artificial Sequence
  Synthetic
cccucuuagguucauuacuu

SEQ ID NO: 823307 - RNA, 20 nt, Artificial Sequence
  Synthetic
ugaaaacucuuucauuacuu

SEQ ID NO: 823308 - RNA, 20 nt, Artificial Sequence
  Synthetic
uaaguuuucuuucauuacuu

SEQ ID NO: 823309 - RNA, 20 nt, Artificial Sequence
  Synthetic
acuaaauauuuguauuacuu

SEQ ID NO: 823310 - RNA, 20 nt, Artificial Sequence
  Synthetic
cccagucagacuccuuacuu

SEQ ID NO: 823311 - RNA, 20 nt, Artificial Sequence
  Synthetic
uuuauauuaaaggcuuacuu

SEQ ID NO: 823312 - RNA, 20 nt, Artificial Sequence
  Synthetic
augaucugauagucuuacuu

SEQ ID NO: 823313 - RNA, 20 nt, Artificial Sequence
  Synthetic
ugcuggcugaaaauuuacuu

SEQ ID NO: 823314 - RNA, 20 nt, Artificial Sequence
  Synthetic
ccuucuaauuuaguuuacuu

SEQ ID NO: 823315 - RNA, 20 nt, Artificial Sequence
  Synthetic
uucucuugugagguuuacuu

SEQ ID NO: 823316 - RNA, 20 nt, Artificial Sequence
  Synthetic
ccuuagcuaaauguuuacuu

SEQ ID NO: 823317 - RNA, 20 nt, Artificial Sequence
  Synthetic
cagcuuuguucauuuuacuu

SEQ ID NO: 823318 - RNA, 20 nt, Artificial Sequence
  Synthetic
uaauuccuuaggaaaaccuu

SEQ ID NO: 823319 - RNA, 20 nt, Artificial Sequence
  Synthetic
ugagcuugaauugaaaccuu

SEQ ID NO: 823320 - RNA, 20 nt, Artificial Sequence
  Synthetic
uaaaauguaguuuaaaccuu

SEQ ID NO: 823321 - RNA, 20 nt, Artificial Sequence
  Synthetic
cuuaacuuguauacaaccuu

SEQ ID NO: 823322 - RNA, 20 nt, Artificial Sequence
  Synthetic
uggucaaucuggccaaccuu

SEQ ID NO: 823323 - RNA, 20 nt, Artificial Sequence
  Synthetic
auucaaaaaauugcaaccuu

SEQ ID NO: 823324 - RNA, 20 nt, Artificial Sequence
  Synthetic
uuuuauucuccacuaaccuu

SEQ ID NO: 823325 - RNA, 20 nt, Artificial Sequence
  Synthetic
ccguggggaguaaacaccuu

SEQ ID NO: 823326 - RNA, 20 nt, Artificial Sequence
  Synthetic
aaugccauuuuaaacaccuu

SEQ ID NO: 823327 - RNA, 20 nt, Artificial Sequence
  Synthetic
cacacacacacacacaccuu

SEQ ID NO: 823328 - RNA, 20 nt, Artificial Sequence
  Synthetic
aagagaagagaagacaccuu

SEQ ID NO: 823329 - RNA, 20 nt, Artificial Sequence
  Synthetic
auauucugcccgcccaccuu

SEQ ID NO: 823330 - RNA, 20 nt, Artificial Sequence
  Synthetic
uuuccucaagaugccaccuu

SEQ ID NO: 823331 - RNA, 20 nt, Artificial Sequence
  Synthetic
acuguuguauuugccaccuu

SEQ ID NO: 823332 - RNA, 20 nt, Artificial Sequence
  Synthetic
aauauacuccacagcaccuu

SEQ ID NO: 823333 - RNA, 20 nt, Artificial Sequence
  Synthetic
uugaaucuguaaaucaccuu

SEQ ID NO: 823334 - RNA, 20 nt, Artificial Sequence
  Synthetic
uauuccuauguacucaccuu

SEQ ID NO: 823335 - RNA, 20 nt, Artificial Sequence
  Synthetic
auacagaugcuccucaccuu

SEQ ID NO: 823336 - RNA, 20 nt, Artificial Sequence
  Synthetic
uccacaaaccuuuucaccuu

SEQ ID NO: 823337 - RNA, 20 nt, Artificial Sequence
  Synthetic
aaaaucuaauucaagaccuu

SEQ ID NO: 823338 - RNA, 20 nt, Artificial Sequence
  Synthetic
ccuguuauuuuucagaccuu

SEQ ID NO: 823339 - RNA, 20 nt, Artificial Sequence
  Synthetic
agggccauuugcaggaccuu

SEQ ID NO: 823340 - RNA, 20 nt, Artificial Sequence
  Synthetic
acuugaaauaauaggaccuu

SEQ ID NO: 823341 - RNA, 20 nt, Artificial Sequence
  Synthetic
uguuccccuggauggaccuu

SEQ ID NO: 823342 - RNA, 20 nt, Artificial Sequence
  Synthetic
ugucuuggcaguaugaccuu

SEQ ID NO: 823343 - RNA, 20 nt, Artificial Sequence
  Synthetic
aucagacaguuccugaccuu

SEQ ID NO: 823344 - RNA, 20 nt, Artificial Sequence
  Synthetic
uuugccacccacgugaccuu

SEQ ID NO: 823345 - RNA, 20 nt, Artificial Sequence
  Synthetic
ccuuuuagcuuggugaccuu

SEQ ID NO: 823346 - RNA, 20 nt, Artificial Sequence
  Synthetic
uauaagaauucaaauaccuu

SEQ ID NO: 823347 - RNA, 20 nt, Artificial Sequence
  Synthetic
uuguucacccuguauaccuu

SEQ ID NO: 823348 - RNA, 20 nt, Artificial Sequence
  Synthetic
uugaaauauauaacuaccuu

SEQ ID NO: 823349 - RNA, 20 nt, Artificial Sequence
  Synthetic
uccuucucuuguccuaccuu

SEQ ID NO: 823350 - RNA, 20 nt, Artificial Sequence
  Synthetic
uucguggauuuaucuaccuu

SEQ ID NO: 823351 - RNA, 20 nt, Artificial Sequence
  Synthetic
aaauauuaacuggguaccuu

SEQ ID NO: 823352 - RNA, 20 nt, Artificial Sequence
  Synthetic
ucaaacucuggcuguaccuu

SEQ ID NO: 823353 - RNA, 20 nt, Artificial Sequence
  Synthetic
uugaaucuguaaauuaccuu

SEQ ID NO: 823354 - RNA, 20 nt, Artificial Sequence
  Synthetic
ugugaauaaaauauuaccuu

SEQ ID NO: 823355 - RNA, 20 nt, Artificial Sequence
  Synthetic
ccaccuguguuuauuaccuu

SEQ ID NO: 823356 - RNA, 20 nt, Artificial Sequence
  Synthetic
aaugguguaaugguuaccuu

SEQ ID NO: 823357 - RNA, 20 nt, Artificial Sequence
  Synthetic
cuucauuuucacuuuaccuu

SEQ ID NO: 823358 - RNA, 20 nt, Artificial Sequence
  Synthetic
uaucuuaucagacaacccuu

SEQ ID NO: 823359 - RNA, 20 nt, Artificial Sequence
  Synthetic
auagaguuucaguaacccuu

SEQ ID NO: 823360 - RNA, 20 nt, Artificial Sequence
  Synthetic
uaucacuauuuuggacccuu

SEQ ID NO: 823361 - RNA, 20 nt, Artificial Sequence
  Synthetic
auuauuuauaauugacccuu

SEQ ID NO: 823362 - RNA, 20 nt, Artificial Sequence
  Synthetic
aaauccuugaagauacccuu

SEQ ID NO: 823363 - RNA, 20 nt, Artificial Sequence
  Synthetic
uuguugauaguuguacccuu

SEQ ID NO: 823364 - RNA, 20 nt, Artificial Sequence
  Synthetic
agcugaguuucuuuacccuu

SEQ ID NO: 823365 - RNA, 20 nt, Artificial Sequence
  Synthetic
ugcuuuaaguguuuacccuu

SEQ ID NO: 823366 - RNA, 20 nt, Artificial Sequence
  Synthetic
uucucuuuuucacuccccuu

SEQ ID NO: 823367 - RNA, 20 nt, Artificial Sequence
  Synthetic
uccaaaaaagagcuccccuu

SEQ ID NO: 823368 - RNA, 20 nt, Artificial Sequence
  Synthetic
ucccaccuucuucuccccuu

SEQ ID NO: 823369 - RNA, 20 nt, Artificial Sequence
  Synthetic
ugcacuugcugaguccccuu

SEQ ID NO: 823370 - RNA, 20 nt, Artificial Sequence
  Synthetic
cuucuggaaagcguccccuu

SEQ ID NO: 823371 - RNA, 20 nt, Artificial Sequence
  Synthetic
uccucuagcucauuccccuu

SEQ ID NO: 823372 - RNA, 20 nt, Artificial Sequence
  Synthetic
augcugccuagauuccccuu

SEQ ID NO: 823373 - RNA, 20 nt, Artificial Sequence
  Synthetic
caucauacuuccuuccccuu

SEQ ID NO: 823374 - RNA, 20 nt, Artificial Sequence
  Synthetic
accugagaauauuuccccuu

SEQ ID NO: 823375 - RNA, 20 nt, Artificial Sequence
  Synthetic
uuaaguacuagacagcccuu

SEQ ID NO: 823376 - RNA, 20 nt, Artificial Sequence
  Synthetic
cagauauggucccagcccuu

SEQ ID NO: 823377 - RNA, 20 nt, Artificial Sequence
  Synthetic
aagcugauggaagagcccuu

SEQ ID NO: 823378 - RNA, 20 nt, Artificial Sequence
  Synthetic
aucuugcccaacuagcccuu

SEQ ID NO: 823379 - RNA, 20 nt, Artificial Sequence
  Synthetic
ucauguuuggauuagcccuu

SEQ ID NO: 823380 - RNA, 20 nt, Artificial Sequence
  Synthetic
cauugggcucccaugcccuu

SEQ ID NO: 823381 - RNA, 20 nt, Artificial Sequence
  Synthetic
aucauucaguauuugcccuu

SEQ ID NO: 823382 - RNA, 20 nt, Artificial Sequence
  Synthetic
cucccacgccuaaaucccuu

SEQ ID NO: 823383 - RNA, 20 nt, Artificial Sequence
  Synthetic
aaaggcauuauccaucccuu

SEQ ID NO: 823384 - RNA, 20 nt, Artificial Sequence
  Synthetic
uuucccuccccucaucccuu

SEQ ID NO: 823385 - RNA, 20 nt, Artificial Sequence
  Synthetic
aacgugcgugcagaucccuu

SEQ ID NO: 823386 - RNA, 20 nt, Artificial Sequence
  Synthetic
uccuucaugaaugaucccuu

SEQ ID NO: 823387 - RNA, 20 nt, Artificial Sequence
  Synthetic
ugcucugacugggcucccuu

SEQ ID NO: 823388 - RNA, 20 nt, Artificial Sequence
  Synthetic
cauauauauuuaucucccuu

SEQ ID NO: 823389 - RNA, 20 nt, Artificial Sequence
  Synthetic
ccucuucccaucucucccuu

SEQ ID NO: 823390 - RNA, 20 nt, Artificial Sequence
  Synthetic
agaguaguccucucucccuu

SEQ ID NO: 823391 - RNA, 20 nt, Artificial Sequence
  Synthetic
uuuuuuuuuaagucucccuu

SEQ ID NO: 823392 - RNA, 20 nt, Artificial Sequence
  Synthetic
uaauacacuuaucuucccuu

SEQ ID NO: 823393 - RNA, 20 nt, Artificial Sequence
  Synthetic
uucuccccaauucuucccuu

SEQ ID NO: 823394 - RNA, 20 nt, Artificial Sequence
  Synthetic
auccuccaucuuguucccuu

SEQ ID NO: 823395 - RNA, 20 nt, Artificial Sequence
  Synthetic
cuucuguccauuuuucccuu

SEQ ID NO: 823396 - RNA, 20 nt, Artificial Sequence
  Synthetic
aagaacaagggcaaagccuu

SEQ ID NO: 823397 - RNA, 20 nt, Artificial Sequence
  Synthetic
uguuucaaacuccaagccuu

SEQ ID NO: 823398 - RNA, 20 nt, Artificial Sequence
  Synthetic
uucuagaaaaggcaagccuu

SEQ ID NO: 823399 - RNA, 20 nt, Artificial Sequence
  Synthetic
uucugaguggcagaagccuu

SEQ ID NO: 823400 - RNA, 20 nt, Artificial Sequence
  Synthetic
acucauuaaauagaagccuu

SEQ ID NO: 823401 - RNA, 20 nt, Artificial Sequence
  Synthetic
aggugggcucccacagccuu

SEQ ID NO: 823402 - RNA, 20 nt, Artificial Sequence
  Synthetic
ucaacuagcaucacagccuu

SEQ ID NO: 823403 - RNA, 20 nt, Artificial Sequence
  Synthetic
caaaaauuguugccagccuu

SEQ ID NO: 823404 - RNA, 20 nt, Artificial Sequence
  Synthetic
acuugaggaucaucagccuu

SEQ ID NO: 823405 - RNA, 20 nt, Artificial Sequence
  Synthetic
ugugaucacuagucagccuu

SEQ ID NO: 823406 - RNA, 20 nt, Artificial Sequence
  Synthetic
auggaacucuauucagccuu

SEQ ID NO: 823407 - RNA, 20 nt, Artificial Sequence
  Synthetic
uguagcaaaaaaagagccuu

SEQ ID NO: 823408 - RNA, 20 nt, Artificial Sequence
  Synthetic
agcuuuugaaagagagccuu

SEQ ID NO: 823409 - RNA, 20 nt, Artificial Sequence
  Synthetic
aacagggcaaagggagccuu

SEQ ID NO: 823410 - RNA, 20 nt, Artificial Sequence
  Synthetic
acugucuuuuucuacgccuu

SEQ ID NO: 823411 - RNA, 20 nt, Artificial Sequence
  Synthetic
cacagcuauucucaggccuu

SEQ ID NO: 823412 - RNA, 20 nt, Artificial Sequence
  Synthetic
uccagauuguggagggccuu

SEQ ID NO: 823413 - RNA, 20 nt, Artificial Sequence
  Synthetic
acauuaggaaguggggccuu

SEQ ID NO: 823414 - RNA, 20 nt, Artificial Sequence
  Synthetic
cacaagaaaugaugggccuu

SEQ ID NO: 823415 - RNA, 20 nt, Artificial Sequence
  Synthetic
aggugggcucccauggccuu

SEQ ID NO: 823416 - RNA, 20 nt, Artificial Sequence
  Synthetic
uguaauuaacugauggccuu

SEQ ID NO: 823417 - RNA, 20 nt, Artificial Sequence
  Synthetic
uauccccucuagcuggccuu

SEQ ID NO: 823418 - RNA, 20 nt, Artificial Sequence
  Synthetic
accaucucaucuuuggccuu

SEQ ID NO: 823419 - RNA, 20 nt, Artificial Sequence
  Synthetic
ugccagauacuaaaugccuu

SEQ ID NO: 823420 - RNA, 20 nt, Artificial Sequence
  Synthetic
aaaaggaauaauaaugccuu

SEQ ID NO: 823421 - RNA, 20 nt, Artificial Sequence
  Synthetic
aagucauugcuuaaugccuu

SEQ ID NO: 823422 - RNA, 20 nt, Artificial Sequence
  Synthetic
caugcagauuuuaaugccuu

SEQ ID NO: 823423 - RNA, 20 nt, Artificial Sequence
  Synthetic
uuucuugguucucaugccuu

SEQ ID NO: 823424 - RNA, 20 nt, Artificial Sequence
  Synthetic
uuagaaauaguucaugccuu

SEQ ID NO: 823425 - RNA, 20 nt, Artificial Sequence
  Synthetic
uuuuuucaguacuaugccuu

SEQ ID NO: 823426 - RNA, 20 nt, Artificial Sequence
  Synthetic
agcauuuuugguccugccuu

SEQ ID NO: 823427 - RNA, 20 nt, Artificial Sequence
  Synthetic
aagacaacuuuaucugccuu

SEQ ID NO: 823428 - RNA, 20 nt, Artificial Sequence
  Synthetic
ccucaguucaugucugccuu

SEQ ID NO: 823429 - RNA, 20 nt, Artificial Sequence
  Synthetic
agaaucuaagaaagugccuu

SEQ ID NO: 823430 - RNA, 20 nt, Artificial Sequence
  Synthetic
auuuaggggaagagugccuu

SEQ ID NO: 823431 - RNA, 20 nt, Artificial Sequence
  Synthetic
cauuaugacuuaugugccuu

SEQ ID NO: 823432 - RNA, 20 nt, Artificial Sequence
  Synthetic
uccacggauugcugugccuu

SEQ ID NO: 823433 - RNA, 20 nt, Artificial Sequence
  Synthetic
uuagaaaggaaaauugccuu

SEQ ID NO: 823434 - RNA, 20 nt, Artificial Sequence
  Synthetic
uccuuacuaagaauugccuu

SEQ ID NO: 823435 - RNA, 20 nt, Artificial Sequence
  Synthetic
ucuccuaauaccauugccuu

SEQ ID NO: 823436 - RNA, 20 nt, Artificial Sequence
  Synthetic
cuuaucaauggcauugccuu

SEQ ID NO: 823437 - RNA, 20 nt, Artificial Sequence
  Synthetic
auuuagcuucguguugccuu

SEQ ID NO: 823438 - RNA, 20 nt, Artificial Sequence
  Synthetic
ucaccacucagauuugccuu

SEQ ID NO: 823439 - RNA, 20 nt, Artificial Sequence
  Synthetic
ugucucugacuguuugccuu

SEQ ID NO: 823440 - RNA, 20 nt, Artificial Sequence
  Synthetic
ugucaccuagauuuugccuu

SEQ ID NO: 823441 - RNA, 20 nt, Artificial Sequence
  Synthetic
ccucagcuucccaaauccuu

SEQ ID NO: 823442 - RNA, 20 nt, Artificial Sequence
  Synthetic
caauguguaucuaaauccuu

SEQ ID NO: 823443 - RNA, 20 nt, Artificial Sequence
  Synthetic
auuguaaaggcagaauccuu

SEQ ID NO: 823444 - RNA, 20 nt, Artificial Sequence
  Synthetic
cagcaggauuuauaauccuu

SEQ ID NO: 823445 - RNA, 20 nt, Artificial Sequence
  Synthetic
uagaaugauuuauaauccuu

SEQ ID NO: 823446 - RNA, 20 nt, Artificial Sequence
  Synthetic
cagcaugauuuauaauccuu

SEQ ID NO: 823447 - RNA, 20 nt, Artificial Sequence
  Synthetic
uaggaugauuuauaauccuu

SEQ ID NO: 823448 - RNA, 20 nt, Artificial Sequence
  Synthetic
uuaauauuuauuuaauccuu

SEQ ID NO: 823449 - RNA, 20 nt, Artificial Sequence
  Synthetic
uuaauauuccauacauccuu

SEQ ID NO: 823450 - RNA, 20 nt, Artificial Sequence
  Synthetic
cacaguggugagccauccuu

SEQ ID NO: 823451 - RNA, 20 nt, Artificial Sequence
  Synthetic
caccaggaaggaucauccuu

SEQ ID NO: 823452 - RNA, 20 nt, Artificial Sequence
  Synthetic
uacuucauauccucauccuu

SEQ ID NO: 823453 - RNA, 20 nt, Artificial Sequence
  Synthetic
ccauauggucucucauccuu

SEQ ID NO: 823454 - RNA, 20 nt, Artificial Sequence
  Synthetic
aucaagugggcuucauccuu

SEQ ID NO: 823455 - RNA, 20 nt, Artificial Sequence
  Synthetic
aauaguauucccagauccuu

SEQ ID NO: 823456 - RNA, 20 nt, Artificial Sequence
  Synthetic
cuuauaguuuugggauccuu

SEQ ID NO: 823457 - RNA, 20 nt, Artificial Sequence
  Synthetic
aaaaauuacuuaauauccuu

SEQ ID NO: 823458 - RNA, 20 nt, Artificial Sequence
  Synthetic
agaaaagacaaucuauccuu

SEQ ID NO: 823459 - RNA, 20 nt, Artificial Sequence
  Synthetic
ucuuucugucuuguauccuu

SEQ ID NO: 823460 - RNA, 20 nt, Artificial Sequence
  Synthetic
cauuugucugcuuuauccuu

SEQ ID NO: 823461 - RNA, 20 nt, Artificial Sequence
  Synthetic
auaauuuucccaaacuccuu

SEQ ID NO: 823462 - RNA, 20 nt, Artificial Sequence
  Synthetic
ccuucccuuucaaacuccuu

SEQ ID NO: 823463 - RNA, 20 nt, Artificial Sequence
  Synthetic
cugguugagauaaacuccuu

SEQ ID NO: 823464 - RNA, 20 nt, Artificial Sequence
  Synthetic
acugcagccuugaacuccuu

SEQ ID NO: 823465 - RNA, 20 nt, Artificial Sequence
  Synthetic
aaaguaguuuuacacuccuu

SEQ ID NO: 823466 - RNA, 20 nt, Artificial Sequence
  Synthetic
ugaaguccuccccacuccuu

SEQ ID NO: 823467 - RNA, 20 nt, Artificial Sequence
  Synthetic
cuuggguagcuccacuccuu

SEQ ID NO: 823468 - RNA, 20 nt, Artificial Sequence
  Synthetic
uauaaauuaauuuacuccuu

SEQ ID NO: 823469 - RNA, 20 nt, Artificial Sequence
  Synthetic
ccuuucucuuuccccuccuu

SEQ ID NO: 823470 - RNA, 20 nt, Artificial Sequence
  Synthetic
agccauuucccaugcuccuu

SEQ ID NO: 823471 - RNA, 20 nt, Artificial Sequence
  Synthetic
ucugaaaauauuaucuccuu

SEQ ID NO: 823472 - RNA, 20 nt, Artificial Sequence
  Synthetic
cuaccucucuuccucuccuu

SEQ ID NO: 823473 - RNA, 20 nt, Artificial Sequence
  Synthetic
ucaucucucuuccucuccuu

SEQ ID NO: 823474 - RNA, 20 nt, Artificial Sequence
  Synthetic
aaugauuaucuucucuccuu

SEQ ID NO: 823475 - RNA, 20 nt, Artificial Sequence
  Synthetic
aaauauuuucuagucuccuu

SEQ ID NO: 823476 - RNA, 20 nt, Artificial Sequence
  Synthetic
uguaauucacaggucuccuu

SEQ ID NO: 823477 - RNA, 20 nt, Artificial Sequence
  Synthetic
ucuucuccaugugucuccuu

SEQ ID NO: 823478 - RNA, 20 nt, Artificial Sequence
  Synthetic
uagaagaaaagauucuccuu

SEQ ID NO: 823479 - RNA, 20 nt, Artificial Sequence
  Synthetic
ucuguaucuauauucuccuu

SEQ ID NO: 823480 - RNA, 20 nt, Artificial Sequence
  Synthetic
uugugcauuaaucaguccuu

SEQ ID NO: 823481 - RNA, 20 nt, Artificial Sequence
  Synthetic
ugccucagugcucaguccuu

SEQ ID NO: 823482 - RNA, 20 nt, Artificial Sequence
  Synthetic
caguuuucaguggaguccuu

SEQ ID NO: 823483 - RNA, 20 nt, Artificial Sequence
  Synthetic
cagcaugauuuauaguccuu

SEQ ID NO: 823484 - RNA, 20 nt, Artificial Sequence
  Synthetic
uucuacagaacuagguccuu

SEQ ID NO: 823485 - RNA, 20 nt, Artificial Sequence
  Synthetic
aagaaaccucaacgguccuu

SEQ ID NO: 823486 - RNA, 20 nt, Artificial Sequence
  Synthetic
cuagaaccuggaggguccuu

SEQ ID NO: 823487 - RNA, 20 nt, Artificial Sequence
  Synthetic
uccuacugcauuugguccuu

SEQ ID NO: 823488 - RNA, 20 nt, Artificial Sequence
  Synthetic
acuuagcaaaauauguccuu

SEQ ID NO: 823489 - RNA, 20 nt, Artificial Sequence
  Synthetic
uggguaauagcuuuguccuu

SEQ ID NO: 823490 - RNA, 20 nt, Artificial Sequence
  Synthetic
aaugguuaaacgaauuccuu

SEQ ID NO: 823491 - RNA, 20 nt, Artificial Sequence
  Synthetic
aggaaagcucugaauuccuu

SEQ ID NO: 823492 - RNA, 20 nt, Artificial Sequence
  Synthetic
ccaagcagauuuaauuccuu

SEQ ID NO: 823493 - RNA, 20 nt, Artificial Sequence
  Synthetic
cucuuucccuuuaauuccuu

SEQ ID NO: 823494 - RNA, 20 nt, Artificial Sequence
  Synthetic
uauacgaauccacauuccuu

SEQ ID NO: 823495 - RNA, 20 nt, Artificial Sequence
  Synthetic
uagaaugauuuauauuccuu

SEQ ID NO: 823496 - RNA, 20 nt, Artificial Sequence
  Synthetic
uagaaugguuuauauuccuu

SEQ ID NO: 823497 - RNA, 20 nt, Artificial Sequence
  Synthetic
acauuuuuaaaaacuuccuu

SEQ ID NO: 823498 - RNA, 20 nt, Artificial Sequence
  Synthetic
caugaccacgugacuuccuu

SEQ ID NO: 823499 - RNA, 20 nt, Artificial Sequence
  Synthetic
uguaguuaaacuacuuccuu

SEQ ID NO: 823500 - RNA, 20 nt, Artificial Sequence
  Synthetic
uaaggcagagagccuuccuu

SEQ ID NO: 823501 - RNA, 20 nt, Artificial Sequence
  Synthetic
aaaaaaaaaaccgcuuccuu

SEQ ID NO: 823502 - RNA, 20 nt, Artificial Sequence
  Synthetic
agcugagguaaggcuuccuu

SEQ ID NO: 823503 - RNA, 20 nt, Artificial Sequence
  Synthetic
ucuuuuugucacaguuccuu

SEQ ID NO: 823504 - RNA, 20 nt, Artificial Sequence
  Synthetic
auaguucauccauguuccuu

SEQ ID NO: 823505 - RNA, 20 nt, Artificial Sequence
  Synthetic
uuuuguuguugcuguuccuu

SEQ ID NO: 823506 - RNA, 20 nt, Artificial Sequence
  Synthetic
cacaggagaguuuguuccuu

SEQ ID NO: 823507 - RNA, 20 nt, Artificial Sequence
  Synthetic
uugaaucuauaaauuuccuu

SEQ ID NO: 823508 - RNA, 20 nt, Artificial Sequence
  Synthetic
agaggcuaaauaauuuccuu

SEQ ID NO: 823509 - RNA, 20 nt, Artificial Sequence
  Synthetic
caaauuuuauuaauuuccuu

SEQ ID NO: 823510 - RNA, 20 nt, Artificial Sequence
  Synthetic
cacucagucaagauuuccuu

SEQ ID NO: 823511 - RNA, 20 nt, Artificial Sequence
  Synthetic
caaaagaguauuauuuccuu

SEQ ID NO: 823512 - RNA, 20 nt, Artificial Sequence
  Synthetic
ucauauuacagacuuuccuu

SEQ ID NO: 823513 - RNA, 20 nt, Artificial Sequence
  Synthetic
aauuucaugaagcuuuccuu

SEQ ID NO: 823514 - RNA, 20 nt, Artificial Sequence
  Synthetic
uagucugaugggcuuuccuu

SEQ ID NO: 823515 - RNA, 20 nt, Artificial Sequence
  Synthetic
cacuccagccagguuuccuu

SEQ ID NO: 823516 - RNA, 20 nt, Artificial Sequence
  Synthetic
uuauaaaauauuguuuccuu

SEQ ID NO: 823517 - RNA, 20 nt, Artificial Sequence
  Synthetic
cuuacaagagacuuuuccuu

SEQ ID NO: 823518 - RNA, 20 nt, Artificial Sequence
  Synthetic
auacaaguauacuuuuccuu

SEQ ID NO: 823519 - RNA, 20 nt, Artificial Sequence
  Synthetic
cauauuuuagaguuuuccuu

SEQ ID NO: 823520 - RNA, 20 nt, Artificial Sequence
  Synthetic
uucauuuacauuuuuuccuu

SEQ ID NO: 823521 - RNA, 20 nt, Artificial Sequence
  Synthetic
auauuaaguggcaaaagcuu

SEQ ID NO: 823522 - RNA, 20 nt, Artificial Sequence
  Synthetic
cucccaguaaagaaaagcuu

SEQ ID NO: 823523 - RNA, 20 nt, Artificial Sequence
  Synthetic
cacuuaaacaguaaaagcuu

SEQ ID NO: 823524 - RNA, 20 nt, Artificial Sequence
  Synthetic
ccacagccuggacaaagcuu

SEQ ID NO: 823525 - RNA, 20 nt, Artificial Sequence
  Synthetic
cguggcaguugccaaagcuu

SEQ ID NO: 823526 - RNA, 20 nt, Artificial Sequence
  Synthetic
agggagcaagucccaagcuu

SEQ ID NO: 823527 - RNA, 20 nt, Artificial Sequence
  Synthetic
uccuuugucucuucaagcuu

SEQ ID NO: 823528 - RNA, 20 nt, Artificial Sequence
  Synthetic
uuucaguaacauagaagcuu

SEQ ID NO: 823529 - RNA, 20 nt, Artificial Sequence
  Synthetic
aucuucuagaaaugaagcuu

SEQ ID NO: 823530 - RNA, 20 nt, Artificial Sequence
  Synthetic
aaugaaauauaaguaagcuu

SEQ ID NO: 823531 - RNA, 20 nt, Artificial Sequence
  Synthetic
aauauaagauuuuuaagcuu

SEQ ID NO: 823532 - RNA, 20 nt, Artificial Sequence
  Synthetic
uacucaaggucacacagcuu

SEQ ID NO: 823533 - RNA, 20 nt, Artificial Sequence
  Synthetic
cuuuuuaguaaagacagcuu

SEQ ID NO: 823534 - RNA, 20 nt, Artificial Sequence
  Synthetic
cugccauccacggacagcuu

SEQ ID NO: 823535 - RNA, 20 nt, Artificial Sequence
  Synthetic
acgucacugcacaccagcuu

SEQ ID NO: 823536 - RNA, 20 nt, Artificial Sequence
  Synthetic
caggaguucaagaccagcuu

SEQ ID NO: 823537 - RNA, 20 nt, Artificial Sequence
  Synthetic
caggaaucugagaccagcuu

SEQ ID NO: 823538 - RNA, 20 nt, Artificial Sequence
  Synthetic
uaaagcaucuagcccagcuu

SEQ ID NO: 823539 - RNA, 20 nt, Artificial Sequence
  Synthetic
ucaccacugcacuccagcuu

SEQ ID NO: 823540 - RNA, 20 nt, Artificial Sequence
  Synthetic
cauggucacugcuccagcuu

SEQ ID NO: 823541 - RNA, 20 nt, Artificial Sequence
  Synthetic
uucuuacggacaggcagcuu

SEQ ID NO: 823542 - RNA, 20 nt, Artificial Sequence
  Synthetic
aaccaaagcaauaucagcuu

SEQ ID NO: 823543 - RNA, 20 nt, Artificial Sequence
  Synthetic
uuccaaucagaacucagcuu

SEQ ID NO: 823544 - RNA, 20 nt, Artificial Sequence
  Synthetic
ucagcagugacacucagcuu

SEQ ID NO: 823545 - RNA, 20 nt, Artificial Sequence
  Synthetic
uauauuacauuauucagcuu

SEQ ID NO: 823546 - RNA, 20 nt, Artificial Sequence
  Synthetic
aacaacauagaguucagcuu

SEQ ID NO: 823547 - RNA, 20 nt, Artificial Sequence
  Synthetic
cuauuccaaaauuucagcuu

SEQ ID NO: 823548 - RNA, 20 nt, Artificial Sequence
  Synthetic
cauauuagcuauuucagcuu

SEQ ID NO: 823549 - RNA, 20 nt, Artificial Sequence
  Synthetic
cuuucaugaauuuucagcuu

SEQ ID NO: 823550 - RNA, 20 nt, Artificial Sequence
  Synthetic
uuuacuggucuuuucagcuu

SEQ ID NO: 823551 - RNA, 20 nt, Artificial Sequence
  Synthetic
auuagugaagacaagagcuu

SEQ ID NO: 823552 - RNA, 20 nt, Artificial Sequence
  Synthetic
uaaacaucucccaagagcuu

SEQ ID NO: 823553 - RNA, 20 nt, Artificial Sequence
  Synthetic
uggauuuuagagaagagcuu

SEQ ID NO: 823554 - RNA, 20 nt, Artificial Sequence
  Synthetic
uuucuaaaguguaagagcuu

SEQ ID NO: 823555 - RNA, 20 nt, Artificial Sequence
  Synthetic
auucuauagcuacagagcuu

SEQ ID NO: 823556 - RNA, 20 nt, Artificial Sequence
  Synthetic
ugcauauaaaaccagagcuu

SEQ ID NO: 823557 - RNA, 20 nt, Artificial Sequence
  Synthetic
cuaaauuguauuuagagcuu

SEQ ID NO: 823558 - RNA, 20 nt, Artificial Sequence
  Synthetic
acaaaagauggaaggagcuu

SEQ ID NO: 823559 - RNA, 20 nt, Artificial Sequence
  Synthetic
auccagcuaaacuggagcuu

SEQ ID NO: 823560 - RNA, 20 nt, Artificial Sequence
  Synthetic
agaagucaagaacugagcuu

SEQ ID NO: 823561 - RNA, 20 nt, Artificial Sequence
  Synthetic
cagguggauugccugagcuu

SEQ ID NO: 823562 - RNA, 20 nt, Artificial Sequence
  Synthetic
uguuuauaauacuugagcuu

SEQ ID NO: 823563 - RNA, 20 nt, Artificial Sequence
  Synthetic
ugggaggauugcuugagcuu

SEQ ID NO: 823564 - RNA, 20 nt, Artificial Sequence
  Synthetic
ccaagcacagguuugagcuu

SEQ ID NO: 823565 - RNA, 20 nt, Artificial Sequence
  Synthetic
uuuucacuacuuuugagcuu

SEQ ID NO: 823566 - RNA, 20 nt, Artificial Sequence
  Synthetic
caaacugguguuuugagcuu

SEQ ID NO: 823567 - RNA, 20 nt, Artificial Sequence
  Synthetic
aucuguagugauaauagcuu

SEQ ID NO: 823568 - RNA, 20 nt, Artificial Sequence
  Synthetic
agcuuccuaaaacauagcuu

SEQ ID NO: 823569 - RNA, 20 nt, Artificial Sequence
  Synthetic
uauaaaaaugugacuagcuu

SEQ ID NO: 823570 - RNA, 20 nt, Artificial Sequence
  Synthetic
uucuucucuucugcuagcuu

SEQ ID NO: 823571 - RNA, 20 nt, Artificial Sequence
  Synthetic
uugaaagcagacucuagcuu

SEQ ID NO: 823572 - RNA, 20 nt, Artificial Sequence
  Synthetic
ugguuagcuaauucuagcuu

SEQ ID NO: 823573 - RNA, 20 nt, Artificial Sequence
  Synthetic
uaguaucuucauucuagcuu

SEQ ID NO: 823574 - RNA, 20 nt, Artificial Sequence
  Synthetic
aaaauuuauuacuguagcuu

SEQ ID NO: 823575 - RNA, 20 nt, Artificial Sequence
  Synthetic
agccugacaaggauuagcuu

SEQ ID NO: 823576 - RNA, 20 nt, Artificial Sequence
  Synthetic
acauaccaggcacuuagcuu

SEQ ID NO: 823577 - RNA, 20 nt, Artificial Sequence
  Synthetic
uuuccauguccucuuagcuu

SEQ ID NO: 823578 - RNA, 20 nt, Artificial Sequence
  Synthetic
ucauaugaguuauuuagcuu

SEQ ID NO: 823579 - RNA, 20 nt, Artificial Sequence
  Synthetic
auuaaaaaaaaaaaacgcuu

SEQ ID NO: 823580 - RNA, 20 nt, Artificial Sequence
  Synthetic
aauagaaacccugaacgcuu

SEQ ID NO: 823581 - RNA, 20 nt, Artificial Sequence
  Synthetic
auuuucaaucaaauacgcuu

SEQ ID NO: 823582 - RNA, 20 nt, Artificial Sequence
  Synthetic
accucaugauccacccgcuu

SEQ ID NO: 823583 - RNA, 20 nt, Artificial Sequence
  Synthetic
cgccugcacucccagcgcuu

SEQ ID NO: 823584 - RNA, 20 nt, Artificial Sequence
  Synthetic
caccuguaauuccagcgcuu

SEQ ID NO: 823585 - RNA, 20 nt, Artificial Sequence
  Synthetic
ugccuguaacccuagcgcuu

SEQ ID NO: 823586 - RNA, 20 nt, Artificial Sequence
  Synthetic
ugaaaaucugaaaaaggcuu

SEQ ID NO: 823587 - RNA, 20 nt, Artificial Sequence
  Synthetic
aaagugaccuggaaaggcuu

SEQ ID NO: 823588 - RNA, 20 nt, Artificial Sequence
  Synthetic
agcaagguuugggaaggcuu

SEQ ID NO: 823589 - RNA, 20 nt, Artificial Sequence
  Synthetic
aaccucagaacuuaaggcuu

SEQ ID NO: 823590 - RNA, 20 nt, Artificial Sequence
  Synthetic
acaguugcugaaacaggcuu

SEQ ID NO: 823591 - RNA, 20 nt, Artificial Sequence
  Synthetic
aucaugguuaacagaggcuu

SEQ ID NO: 823592 - RNA, 20 nt, Artificial Sequence
  Synthetic
aucuccuucuguggaggcuu

SEQ ID NO: 823593 - RNA, 20 nt, Artificial Sequence
  Synthetic
ugcgcuuuuaaaauaggcuu

SEQ ID NO: 823594 - RNA, 20 nt, Artificial Sequence
  Synthetic
aacucugauuuaguaggcuu

SEQ ID NO: 823595 - RNA, 20 nt, Artificial Sequence
  Synthetic
ccuugcucuggauuaggcuu

SEQ ID NO: 823596 - RNA, 20 nt, Artificial Sequence
  Synthetic
ucuggcaggagucccggcuu

SEQ ID NO: 823597 - RNA, 20 nt, Artificial Sequence
  Synthetic
acugaucaguauaagggcuu

SEQ ID NO: 823598 - RNA, 20 nt, Artificial Sequence
  Synthetic
acuacuaccacacagggcuu

SEQ ID NO: 823599 - RNA, 20 nt, Artificial Sequence
  Synthetic
ccaaguucauggaggggcuu

SEQ ID NO: 823600 - RNA, 20 nt, Artificial Sequence
  Synthetic
aauuaauagugguggggcuu

SEQ ID NO: 823601 - RNA, 20 nt, Artificial Sequence
  Synthetic
aaauaagauuuuuggggcuu

SEQ ID NO: 823602 - RNA, 20 nt, Artificial Sequence
  Synthetic
aagaaugauacaaugggcuu

SEQ ID NO: 823603 - RNA, 20 nt, Artificial Sequence
  Synthetic
ugauuaaaauacaugggcuu

SEQ ID NO: 823604 - RNA, 20 nt, Artificial Sequence
  Synthetic
aguuuugguucuaugggcuu

SEQ ID NO: 823605 - RNA, 20 nt, Artificial Sequence
  Synthetic
ugguucugguuucugggcuu

SEQ ID NO: 823606 - RNA, 20 nt, Artificial Sequence
  Synthetic
aucagaaaucagaauggcuu

SEQ ID NO: 823607 - RNA, 20 nt, Artificial Sequence
  Synthetic
agcagauaaaccgauggcuu

SEQ ID NO: 823608 - RNA, 20 nt, Artificial Sequence
  Synthetic
auucucauucuggauggcuu

SEQ ID NO: 823609 - RNA, 20 nt, Artificial Sequence
  Synthetic
uuuauacauagugauggcuu

SEQ ID NO: 823610 - RNA, 20 nt, Artificial Sequence
  Synthetic
uagaaacacaggacuggcuu

SEQ ID NO: 823611 - RNA, 20 nt, Artificial Sequence
  Synthetic
cuuggccauaugccuggcuu

SEQ ID NO: 823612 - RNA, 20 nt, Artificial Sequence
  Synthetic
cagguugccgcugcuggcuu

SEQ ID NO: 823613 - RNA, 20 nt, Artificial Sequence
  Synthetic
uacaucucaucuucuggcuu

SEQ ID NO: 823614 - RNA, 20 nt, Artificial Sequence
  Synthetic
ccuuggcaaaccaguggcuu

SEQ ID NO: 823615 - RNA, 20 nt, Artificial Sequence
  Synthetic
aaaaacugagagaguggcuu

SEQ ID NO: 823616 - RNA, 20 nt, Artificial Sequence
  Synthetic
ucucccccucuauguggcuu

SEQ ID NO: 823617 - RNA, 20 nt, Artificial Sequence
  Synthetic
auccucagucccuguggcuu

SEQ ID NO: 823618 - RNA, 20 nt, Artificial Sequence
  Synthetic
ugcagaacucuguguggcuu

SEQ ID NO: 823619 - RNA, 20 nt, Artificial Sequence
  Synthetic
agcaagguguuuuguggcuu

SEQ ID NO: 823620 - RNA, 20 nt, Artificial Sequence
  Synthetic
accauucuggacauuggcuu

SEQ ID NO: 823621 - RNA, 20 nt, Artificial Sequence
  Synthetic
ccaaaaguauccauuggcuu

SEQ ID NO: 823622 - RNA, 20 nt, Artificial Sequence
  Synthetic
aagucugauaucauuggcuu

SEQ ID NO: 823623 - RNA, 20 nt, Artificial Sequence
  Synthetic
aagauguguacauuuggcuu

SEQ ID NO: 823624 - RNA, 20 nt, Artificial Sequence
  Synthetic
cugcgcuggagauuuggcuu

SEQ ID NO: 823625 - RNA, 20 nt, Artificial Sequence
  Synthetic
cacuguaauauauuuggcuu

SEQ ID NO: 823626 - RNA, 20 nt, Artificial Sequence
  Synthetic
cuaaauguuuacuuuggcuu

SEQ ID NO: 823627 - RNA, 20 nt, Artificial Sequence
  Synthetic
ucuggauuaggcuuuggcuu

SEQ ID NO: 823628 - RNA, 20 nt, Artificial Sequence
  Synthetic
uuuugguacaaguuuggcuu

SEQ ID NO: 823629 - RNA, 20 nt, Artificial Sequence
  Synthetic
uaagcacucuauuuuggcuu

SEQ ID NO: 823630 - RNA, 20 nt, Artificial Sequence
  Synthetic
cagcuuuguucuuuuggcuu

SEQ ID NO: 823631 - RNA, 20 nt, Artificial Sequence
  Synthetic
aggagaacaaaaaaaugcuu

SEQ ID NO: 823632 - RNA, 20 nt, Artificial Sequence
  Synthetic
aucccauauccaaaaugcuu

SEQ ID NO: 823633 - RNA, 20 nt, Artificial Sequence
  Synthetic
uaugcucccauaaaaugcuu

SEQ ID NO: 823634 - RNA, 20 nt, Artificial Sequence
  Synthetic
uauuuuaaaccacaaugcuu

SEQ ID NO: 823635 - RNA, 20 nt, Artificial Sequence
  Synthetic
cugaacugaacugaaugcuu

SEQ ID NO: 823636 - RNA, 20 nt, Artificial Sequence
  Synthetic
auaaacaaugucacaugcuu

SEQ ID NO: 823637 - RNA, 20 nt, Artificial Sequence
  Synthetic
aaaaauuuaaaagcaugcuu

SEQ ID NO: 823638 - RNA, 20 nt, Artificial Sequence
  Synthetic
cacgauccauuaucaugcuu

SEQ ID NO: 823639 - RNA, 20 nt, Artificial Sequence
  Synthetic
uagcauaaaaauucaugcuu

SEQ ID NO: 823640 - RNA, 20 nt, Artificial Sequence
  Synthetic
auuuaauaguuaagaugcuu

SEQ ID NO: 823641 - RNA, 20 nt, Artificial Sequence
  Synthetic
cuaucuaaaaucagaugcuu

SEQ ID NO: 823642 - RNA, 20 nt, Artificial Sequence
  Synthetic
uaaaaauaaaguugaugcuu

SEQ ID NO: 823643 - RNA, 20 nt, Artificial Sequence
  Synthetic
agauacccucuacuaugcuu

SEQ ID NO: 823644 - RNA, 20 nt, Artificial Sequence
  Synthetic
uuagauuuucuaguaugcuu

SEQ ID NO: 823645 - RNA, 20 nt, Artificial Sequence
  Synthetic
uuggauggccccuuaugcuu

SEQ ID NO: 823646 - RNA, 20 nt, Artificial Sequence
  Synthetic
ccacagaguggaaacugcuu

SEQ ID NO: 823647 - RNA, 20 nt, Artificial Sequence
  Synthetic
cuuucccucuuucacugcuu

SEQ ID NO: 823648 - RNA, 20 nt, Artificial Sequence
  Synthetic
uuuauuuucuuucacugcuu

SEQ ID NO: 823649 - RNA, 20 nt, Artificial Sequence
  Synthetic
uuagauuuaagcuacugcuu

SEQ ID NO: 823650 - RNA, 20 nt, Artificial Sequence
  Synthetic
uucucauuuuuuuacugcuu

SEQ ID NO: 823651 - RNA, 20 nt, Artificial Sequence
  Synthetic
ccagcagcggcaaccugcuu

SEQ ID NO: 823652 - RNA, 20 nt, Artificial Sequence
  Synthetic
cucaggcaauccaccugcuu

SEQ ID NO: 823653 - RNA, 20 nt, Artificial Sequence
  Synthetic
uaaaauggagucuccugcuu

SEQ ID NO: 823654 - RNA, 20 nt, Artificial Sequence
  Synthetic
uguguuagacaguccugcuu

SEQ ID NO: 823655 - RNA, 20 nt, Artificial Sequence
  Synthetic
ugccaagaauauuccugcuu

SEQ ID NO: 823656 - RNA, 20 nt, Artificial Sequence
  Synthetic
cauuucucuuccagcugcuu

SEQ ID NO: 823657 - RNA, 20 nt, Artificial Sequence
  Synthetic
aaauaacaaaauggcugcuu

SEQ ID NO: 823658 - RNA, 20 nt, Artificial Sequence
  Synthetic
caugguuugaacugcugcuu

SEQ ID NO: 823659 - RNA, 20 nt, Artificial Sequence
  Synthetic
aauuaagcuuacaucugcuu

SEQ ID NO: 823660 - RNA, 20 nt, Artificial Sequence
  Synthetic
uuccuuuuagguaucugcuu

SEQ ID NO: 823661 - RNA, 20 nt, Artificial Sequence
  Synthetic
uguacuuguuuucucugcuu

SEQ ID NO: 823662 - RNA, 20 nt, Artificial Sequence
  Synthetic
caugauucuugauucugcuu

SEQ ID NO: 823663 - RNA, 20 nt, Artificial Sequence
  Synthetic
uuguaauuuaucuucugcuu

SEQ ID NO: 823664 - RNA, 20 nt, Artificial Sequence
  Synthetic
auccaaaacauuuucugcuu

SEQ ID NO: 823665 - RNA, 20 nt, Artificial Sequence
  Synthetic
aaauaacuucaaaagugcuu

SEQ ID NO: 823666 - RNA, 20 nt, Artificial Sequence
  Synthetic
uuuggcuuuggaaagugcuu

SEQ ID NO: 823667 - RNA, 20 nt, Artificial Sequence
  Synthetic
aaauacgaaugaaagugcuu

SEQ ID NO: 823668 - RNA, 20 nt, Artificial Sequence
  Synthetic
cucauguauauacagugcuu

SEQ ID NO: 823669 - RNA, 20 nt, Artificial Sequence
  Synthetic
cacuuguaaucccagugcuu

SEQ ID NO: 823670 - RNA, 20 nt, Artificial Sequence
  Synthetic
cgucuggaauuccagugcuu

SEQ ID NO: 823671 - RNA, 20 nt, Artificial Sequence
  Synthetic
uuauuucuggggcagugcuu

SEQ ID NO: 823672 - RNA, 20 nt, Artificial Sequence
  Synthetic
ugccugucaucucagugcuu

SEQ ID NO: 823673 - RNA, 20 nt, Artificial Sequence
  Synthetic
ugccuguaauccuagugcuu

SEQ ID NO: 823674 - RNA, 20 nt, Artificial Sequence
  Synthetic
aaagagaaauuaaggugcuu

SEQ ID NO: 823675 - RNA, 20 nt, Artificial Sequence
  Synthetic
agaaucuuaaacaggugcuu

SEQ ID NO: 823676 - RNA, 20 nt, Artificial Sequence
  Synthetic
ugccuguaauccaggugcuu

SEQ ID NO: 823677 - RNA, 20 nt, Artificial Sequence
  Synthetic
ugcuggagaugauggugcuu

SEQ ID NO: 823678 - RNA, 20 nt, Artificial Sequence
  Synthetic
uuaucuaucuucuggugcuu

SEQ ID NO: 823679 - RNA, 20 nt, Artificial Sequence
  Synthetic
ugccuguaaucccugugcuu

SEQ ID NO: 823680 - RNA, 20 nt, Artificial Sequence
  Synthetic
uugccaauaucucugugcuu

SEQ ID NO: 823681 - RNA, 20 nt, Artificial Sequence
  Synthetic
aggaugcaucaagugugcuu

SEQ ID NO: 823682 - RNA, 20 nt, Artificial Sequence
  Synthetic
augaggcgggaggauugcuu

SEQ ID NO: 823683 - RNA, 20 nt, Artificial Sequence
  Synthetic
aaccaaagcugauauugcuu

SEQ ID NO: 823684 - RNA, 20 nt, Artificial Sequence
  Synthetic
cuuggauuguuguauugcuu

SEQ ID NO: 823685 - RNA, 20 nt, Artificial Sequence
  Synthetic
agaaaaaaauguccuugcuu

SEQ ID NO: 823686 - RNA, 20 nt, Artificial Sequence
  Synthetic
cagcuuuguuauucuugcuu

SEQ ID NO: 823687 - RNA, 20 nt, Artificial Sequence
  Synthetic
aauaggaagcagaguugcuu

SEQ ID NO: 823688 - RNA, 20 nt, Artificial Sequence
  Synthetic
ccauucuuaaaauguugcuu

SEQ ID NO: 823689 - RNA, 20 nt, Artificial Sequence
  Synthetic
aauuucaugcacuguugcuu

SEQ ID NO: 823690 - RNA, 20 nt, Artificial Sequence
  Synthetic
uguuggcagagcuguugcuu

SEQ ID NO: 823691 - RNA, 20 nt, Artificial Sequence
  Synthetic
uguuaugguucuuguugcuu

SEQ ID NO: 823692 - RNA, 20 nt, Artificial Sequence
  Synthetic
uuaucaauuauaauuugcuu

SEQ ID NO: 823693 - RNA, 20 nt, Artificial Sequence
  Synthetic
uuuggcaacguaauuugcuu

SEQ ID NO: 823694 - RNA, 20 nt, Artificial Sequence
  Synthetic
agauugaaauggauuugcuu

SEQ ID NO: 823695 - RNA, 20 nt, Artificial Sequence
  Synthetic
auuauccauauucuuugcuu

SEQ ID NO: 823696 - RNA, 20 nt, Artificial Sequence
  Synthetic
cauuggcaggauguuugcuu

SEQ ID NO: 823697 - RNA, 20 nt, Artificial Sequence
  Synthetic
aagucugggucuguuugcuu

SEQ ID NO: 823698 - RNA, 20 nt, Artificial Sequence
  Synthetic
ugccagcuugcauuuugcuu

SEQ ID NO: 823699 - RNA, 20 nt, Artificial Sequence
  Synthetic
cagcuuuguucuuuuugcuu

SEQ ID NO: 823700 - RNA, 20 nt, Artificial Sequence
  Synthetic
aacuauaugaguuuuugcuu

SEQ ID NO: 823701 - RNA, 20 nt, Artificial Sequence
  Synthetic
uuuuuuucucuuuuuugcuu

SEQ ID NO: 823702 - RNA, 20 nt, Artificial Sequence
  Synthetic
cuuuuccagguuuuuugcuu

SEQ ID NO: 823703 - RNA, 20 nt, Artificial Sequence
  Synthetic
aaaauaacuggaaaaaucuu

SEQ ID NO: 823704 - RNA, 20 nt, Artificial Sequence
  Synthetic
uaguauacgucuaaaaucuu

SEQ ID NO: 823705 - RNA, 20 nt, Artificial Sequence
  Synthetic
cauggaagcugccaaaucuu

SEQ ID NO: 823706 - RNA, 20 nt, Artificial Sequence
  Synthetic
uuugaaaggcagcaaaucuu

SEQ ID NO: 823707 - RNA, 20 nt, Artificial Sequence
  Synthetic
ugggaaauucuucaaaucuu

SEQ ID NO: 823708 - RNA, 20 nt, Artificial Sequence
  Synthetic
auaaaacauacugaaaucuu

SEQ ID NO: 823709 - RNA, 20 nt, Artificial Sequence
  Synthetic
caucuaugaugugaaaucuu

SEQ ID NO: 823710 - RNA, 20 nt, Artificial Sequence
  Synthetic
ugcacuuacauauaaaucuu

SEQ ID NO: 823711 - RNA, 20 nt, Artificial Sequence
  Synthetic
uaguuuaggcauuaaaucuu

SEQ ID NO: 823712 - RNA, 20 nt, Artificial Sequence
  Synthetic
cauuuucccuagacaaucuu

SEQ ID NO: 823713 - RNA, 20 nt, Artificial Sequence
  Synthetic
cuacauaugucuacaaucuu

SEQ ID NO: 823714 - RNA, 20 nt, Artificial Sequence
  Synthetic
acucuuuuaaaugcaaucuu

SEQ ID NO: 823715 - RNA, 20 nt, Artificial Sequence
  Synthetic
uauaauuuuuaugcaaucuu

SEQ ID NO: 823716 - RNA, 20 nt, Artificial Sequence
  Synthetic
cuugcuggcugugcaaucuu

SEQ ID NO: 823717 - RNA, 20 nt, Artificial Sequence
  Synthetic
uuaguuugcuuugcaaucuu

SEQ ID NO: 823718 - RNA, 20 nt, Artificial Sequence
  Synthetic
cuuuacuucuagucaaucuu

SEQ ID NO: 823719 - RNA, 20 nt, Artificial Sequence
  Synthetic
cagcauauugaaagaaucuu

SEQ ID NO: 823720 - RNA, 20 nt, Artificial Sequence
  Synthetic
aaagaauugagcguaaucuu

SEQ ID NO: 823721 - RNA, 20 nt, Artificial Sequence
  Synthetic
uuagucuucuaauuaaucuu

SEQ ID NO: 823722 - RNA, 20 nt, Artificial Sequence
  Synthetic
uaaaaauuuguauuaaucuu

SEQ ID NO: 823723 - RNA, 20 nt, Artificial Sequence
  Synthetic
ugcucugauugguuaaucuu

SEQ ID NO: 823724 - RNA, 20 nt, Artificial Sequence
  Synthetic
uuguaggaaauguuaaucuu

SEQ ID NO: 823725 - RNA, 20 nt, Artificial Sequence
  Synthetic
caggcucucuuguuaaucuu

SEQ ID NO: 823726 - RNA, 20 nt, Artificial Sequence
  Synthetic
uggaaauuugcuuuaaucuu

SEQ ID NO: 823727 - RNA, 20 nt, Artificial Sequence
  Synthetic
ugaaaagugcuaaacaucuu

SEQ ID NO: 823728 - RNA, 20 nt, Artificial Sequence
  Synthetic
ucacuuuaguuaaacaucuu

SEQ ID NO: 823729 - RNA, 20 nt, Artificial Sequence
  Synthetic
aggaucaugcuguacaucuu

SEQ ID NO: 823730 - RNA, 20 nt, Artificial Sequence
  Synthetic
uccauaguccaacccaucuu

SEQ ID NO: 823731 - RNA, 20 nt, Artificial Sequence
  Synthetic
cucugcaucucccccaucuu

SEQ ID NO: 823732 - RNA, 20 nt, Artificial Sequence
  Synthetic
aaggcagccuguuccaucuu

SEQ ID NO: 823733 - RNA, 20 nt, Artificial Sequence
  Synthetic
agcucuuuuuugaucaucuu

SEQ ID NO: 823734 - RNA, 20 nt, Artificial Sequence
  Synthetic
auauuucaguuuaucaucuu

SEQ ID NO: 823735 - RNA, 20 nt, Artificial Sequence
  Synthetic
ugucacugacccuucaucuu

SEQ ID NO: 823736 - RNA, 20 nt, Artificial Sequence
  Synthetic
caguagaacccuuucaucuu

SEQ ID NO: 823737 - RNA, 20 nt, Artificial Sequence
  Synthetic
aauagugucuuuuucaucuu

SEQ ID NO: 823738 - RNA, 20 nt, Artificial Sequence
  Synthetic
aaagucaaaaaaaagaucuu

SEQ ID NO: 823739 - RNA, 20 nt, Artificial Sequence
  Synthetic
ucuugauucuagaagaucuu

SEQ ID NO: 823740 - RNA, 20 nt, Artificial Sequence
  Synthetic
ugagaguauguuaagaucuu

SEQ ID NO: 823741 - RNA, 20 nt, Artificial Sequence
  Synthetic
uccuaacuucuaaggaucuu

SEQ ID NO: 823742 - RNA, 20 nt, Artificial Sequence
  Synthetic
cccuaauuuuauaggaucuu

SEQ ID NO: 823743 - RNA, 20 nt, Artificial Sequence
  Synthetic
cauuuuggugucuggaucuu

SEQ ID NO: 823744 - RNA, 20 nt, Artificial Sequence
  Synthetic
ccaacacauguaaugaucuu

SEQ ID NO: 823745 - RNA, 20 nt, Artificial Sequence
  Synthetic
cccucauucugcaugaucuu

SEQ ID NO: 823746 - RNA, 20 nt, Artificial Sequence
  Synthetic
auuucucuaucccugaucuu

SEQ ID NO: 823747 - RNA, 20 nt, Artificial Sequence
  Synthetic
cuucacuauuuccugaucuu

SEQ ID NO: 823748 - RNA, 20 nt, Artificial Sequence
  Synthetic
agccccaaagagcugaucuu

SEQ ID NO: 823749 - RNA, 20 nt, Artificial Sequence
  Synthetic
agcuugcuuuuggugaucuu

SEQ ID NO: 823750 - RNA, 20 nt, Artificial Sequence
  Synthetic
acagaaagagaaaauaucuu

SEQ ID NO: 823751 - RNA, 20 nt, Artificial Sequence
  Synthetic
uuagguguaauagauaucuu

SEQ ID NO: 823752 - RNA, 20 nt, Artificial Sequence
  Synthetic
aguucuuaucuagauaucuu

SEQ ID NO: 823753 - RNA, 20 nt, Artificial Sequence
  Synthetic
acagucauauauuauaucuu

SEQ ID NO: 823754 - RNA, 20 nt, Artificial Sequence
  Synthetic
accuggcuucacacuaucuu

SEQ ID NO: 823755 - RNA, 20 nt, Artificial Sequence
  Synthetic
auauauauucacaguaucuu

SEQ ID NO: 823756 - RNA, 20 nt, Artificial Sequence
  Synthetic
aaaauauucugaauuaucuu

SEQ ID NO: 823757 - RNA, 20 nt, Artificial Sequence
  Synthetic
uggagcucacccauuaucuu

SEQ ID NO: 823758 - RNA, 20 nt, Artificial Sequence
  Synthetic
cuuaaauauuagcuuaucuu

SEQ ID NO: 823759 - RNA, 20 nt, Artificial Sequence
  Synthetic
aacccuaaucaucuuaucuu

SEQ ID NO: 823760 - RNA, 20 nt, Artificial Sequence
  Synthetic
acauaccuaauauuuaucuu

SEQ ID NO: 823761 - RNA, 20 nt, Artificial Sequence
  Synthetic
ucaaagcugugguuuaucuu

SEQ ID NO: 823762 - RNA, 20 nt, Artificial Sequence
  Synthetic
uugcaaaacuguuuuaucuu

SEQ ID NO: 823763 - RNA, 20 nt, Artificial Sequence
  Synthetic
aaguuucuugagaaacucuu

SEQ ID NO: 823764 - RNA, 20 nt, Artificial Sequence
  Synthetic
uaugaagcauaagaacucuu

SEQ ID NO: 823765 - RNA, 20 nt, Artificial Sequence
  Synthetic
cugaacugaacugaacucuu

SEQ ID NO: 823766 - RNA, 20 nt, Artificial Sequence
  Synthetic
cucauuuuucuuuaacucuu

SEQ ID NO: 823767 - RNA, 20 nt, Artificial Sequence
  Synthetic
uuggaggaugaaacacucuu

SEQ ID NO: 823768 - RNA, 20 nt, Artificial Sequence
  Synthetic
cagcgcauguucucacucuu

SEQ ID NO: 823769 - RNA, 20 nt, Artificial Sequence
  Synthetic
uuugauuugcaaagacucuu

SEQ ID NO: 823770 - RNA, 20 nt, Artificial Sequence
  Synthetic
uuucugcagggucuacucuu

SEQ ID NO: 823771 - RNA, 20 nt, Artificial Sequence
  Synthetic
aguaccuccauucuacucuu

SEQ ID NO: 823772 - RNA, 20 nt, Artificial Sequence
  Synthetic
ccauaucucucaguacucuu

SEQ ID NO: 823773 - RNA, 20 nt, Artificial Sequence
  Synthetic
ugaagaaaauuaguacucuu

SEQ ID NO: 823774 - RNA, 20 nt, Artificial Sequence
  Synthetic
ucagaucggugauuacucuu

SEQ ID NO: 823775 - RNA, 20 nt, Artificial Sequence
  Synthetic
ucuucuggcuaguuacucuu

SEQ ID NO: 823776 - RNA, 20 nt, Artificial Sequence
  Synthetic
cugcaucucauucaccucuu

SEQ ID NO: 823777 - RNA, 20 nt, Artificial Sequence
  Synthetic
cccagacccccagaccucuu

SEQ ID NO: 823778 - RNA, 20 nt, Artificial Sequence
  Synthetic
acaguuagagaauaccucuu

SEQ ID NO: 823779 - RNA, 20 nt, Artificial Sequence
  Synthetic
aauaauaaaaucuaccucuu

SEQ ID NO: 823780 - RNA, 20 nt, Artificial Sequence
  Synthetic
aaugacuucuuuuaccucuu

SEQ ID NO: 823781 - RNA, 20 nt, Artificial Sequence
  Synthetic
aacuuuuucacuccccucuu

SEQ ID NO: 823782 - RNA, 20 nt, Artificial Sequence
  Synthetic
auaaaucaauuugcccucuu

SEQ ID NO: 823783 - RNA, 20 nt, Artificial Sequence
  Synthetic
aaguucugcaucagccucuu

SEQ ID NO: 823784 - RNA, 20 nt, Artificial Sequence
  Synthetic
aacaaauucaucagccucuu

SEQ ID NO: 823785 - RNA, 20 nt, Artificial Sequence
  Synthetic
aaucccugcaagggccucuu

SEQ ID NO: 823786 - RNA, 20 nt, Artificial Sequence
  Synthetic
cacugccaccucugccucuu

SEQ ID NO: 823787 - RNA, 20 nt, Artificial Sequence
  Synthetic
auucauauugucuuccucuu

SEQ ID NO: 823788 - RNA, 20 nt, Artificial Sequence
  Synthetic
cucagcucucuuuuccucuu

SEQ ID NO: 823789 - RNA, 20 nt, Artificial Sequence
  Synthetic
agcugaaaaguuuuccucuu

SEQ ID NO: 823790 - RNA, 20 nt, Artificial Sequence
  Synthetic
aagauugucccaaagcucuu

SEQ ID NO: 823791 - RNA, 20 nt, Artificial Sequence
  Synthetic
auaaagugcuuuaagcucuu

SEQ ID NO: 823792 - RNA, 20 nt, Artificial Sequence
  Synthetic
caccuguaaucccagcucuu

SEQ ID NO: 823793 - RNA, 20 nt, Artificial Sequence
  Synthetic
uggaguguaagccagcucuu

SEQ ID NO: 823794 - RNA, 20 nt, Artificial Sequence
  Synthetic
acuuccguaacugagcucuu

SEQ ID NO: 823795 - RNA, 20 nt, Artificial Sequence
  Synthetic
ucaaucuaaaaauagcucuu

SEQ ID NO: 823796 - RNA, 20 nt, Artificial Sequence
  Synthetic
auuugucauaauaggcucuu

SEQ ID NO: 823797 - RNA, 20 nt, Artificial Sequence
  Synthetic
acauauuccucagggcucuu

SEQ ID NO: 823798 - RNA, 20 nt, Artificial Sequence
  Synthetic
aauuuccuucuagggcucuu

SEQ ID NO: 823799 - RNA, 20 nt, Artificial Sequence
  Synthetic
aaguuguaaauauggcucuu

SEQ ID NO: 823800 - RNA, 20 nt, Artificial Sequence
  Synthetic
caucaguguuaucugcucuu

SEQ ID NO: 823801 - RNA, 20 nt, Artificial Sequence
  Synthetic
cccuuaggauaauugcucuu

SEQ ID NO: 823802 - RNA, 20 nt, Artificial Sequence
  Synthetic
acaaagccagccaaucucuu

SEQ ID NO: 823803 - RNA, 20 nt, Artificial Sequence
  Synthetic
ccaaccucauuacaucucuu

SEQ ID NO: 823804 - RNA, 20 nt, Artificial Sequence
  Synthetic
accugaccaacccaucucuu

SEQ ID NO: 823805 - RNA, 20 nt, Artificial Sequence
  Synthetic
cugaggugacaugaucucuu

SEQ ID NO: 823806 - RNA, 20 nt, Artificial Sequence
  Synthetic
uggccacuccucacucucuu

SEQ ID NO: 823807 - RNA, 20 nt, Artificial Sequence
  Synthetic
ugcauucuuauuccucucuu

SEQ ID NO: 823808 - RNA, 20 nt, Artificial Sequence
  Synthetic
auucccacaacaucucucuu

SEQ ID NO: 823809 - RNA, 20 nt, Artificial Sequence
  Synthetic
aaaguccuaaccucucucuu

SEQ ID NO: 823810 - RNA, 20 nt, Artificial Sequence
  Synthetic
caguuauuuugcucucucuu

SEQ ID NO: 823811 - RNA, 20 nt, Artificial Sequence
  Synthetic
augaccucuuucucucucuu

SEQ ID NO: 823812 - RNA, 20 nt, Artificial Sequence
  Synthetic
ucaucaccuccuucucucuu

SEQ ID NO: 823813 - RNA, 20 nt, Artificial Sequence
  Synthetic
auuguucaucguagucucuu

SEQ ID NO: 823814 - RNA, 20 nt, Artificial Sequence
  Synthetic
uaauauauuuaaggucucuu

SEQ ID NO: 823815 - RNA, 20 nt, Artificial Sequence
  Synthetic
ugugaguacaugugucucuu

SEQ ID NO: 823816 - RNA, 20 nt, Artificial Sequence
  Synthetic
auacuggaucccauucucuu

SEQ ID NO: 823817 - RNA, 20 nt, Artificial Sequence
  Synthetic
uguagaagucccauucucuu

SEQ ID NO: 823818 - RNA, 20 nt, Artificial Sequence
  Synthetic
aaaaaauguugacuucucuu

SEQ ID NO: 823819 - RNA, 20 nt, Artificial Sequence
  Synthetic
aaugcacugcaucuucucuu

SEQ ID NO: 823820 - RNA, 20 nt, Artificial Sequence
  Synthetic
aacuuaucaggucuucucuu

SEQ ID NO: 823821 - RNA, 20 nt, Artificial Sequence
  Synthetic
ccuuacgguuuucuucucuu

SEQ ID NO: 823822 - RNA, 20 nt, Artificial Sequence
  Synthetic
uauacuaaaaaaguucucuu

SEQ ID NO: 823823 - RNA, 20 nt, Artificial Sequence
  Synthetic
cauuugaauacaguucucuu

SEQ ID NO: 823824 - RNA, 20 nt, Artificial Sequence
  Synthetic
aaaaagagcuaauuucucuu

SEQ ID NO: 823825 - RNA, 20 nt, Artificial Sequence
  Synthetic
ccuguuuuuaacuuucucuu

SEQ ID NO: 823826 - RNA, 20 nt, Artificial Sequence
  Synthetic
aacuaacccuacuuucucuu

SEQ ID NO: 823827 - RNA, 20 nt, Artificial Sequence
  Synthetic
aauuaacucuuguuucucuu

SEQ ID NO: 823828 - RNA, 20 nt, Artificial Sequence
  Synthetic
agaaaguaguguuuucucuu

SEQ ID NO: 823829 - RNA, 20 nt, Artificial Sequence
  Synthetic
cccaacauaaucuaagucuu

SEQ ID NO: 823830 - RNA, 20 nt, Artificial Sequence
  Synthetic
ucagccaguggcacagucuu

SEQ ID NO: 823831 - RNA, 20 nt, Artificial Sequence
  Synthetic
cugcuguuuggcacagucuu

SEQ ID NO: 823832 - RNA, 20 nt, Artificial Sequence
  Synthetic
uuccuucagaagacagucuu

SEQ ID NO: 823833 - RNA, 20 nt, Artificial Sequence
  Synthetic
ucuggaauuucuacagucuu

SEQ ID NO: 823834 - RNA, 20 nt, Artificial Sequence
  Synthetic
cuuauaaauuacccagucuu

SEQ ID NO: 823835 - RNA, 20 nt, Artificial Sequence
  Synthetic
cuuauauaccaugcagucuu

SEQ ID NO: 823836 - RNA, 20 nt, Artificial Sequence
  Synthetic
agacuuaggaaaucagucuu

SEQ ID NO: 823837 - RNA, 20 nt, Artificial Sequence
  Synthetic
uuuauaaauuauucagucuu

SEQ ID NO: 823838 - RNA, 20 nt, Artificial Sequence
  Synthetic
ugcagagaagggagagucuu

SEQ ID NO: 823839 - RNA, 20 nt, Artificial Sequence
  Synthetic
caaaagugaaugagagucuu

SEQ ID NO: 823840 - RNA, 20 nt, Artificial Sequence
  Synthetic
aucaguagcccuggagucuu

SEQ ID NO: 823841 - RNA, 20 nt, Artificial Sequence
  Synthetic
cauacuuggcuuugagucuu

SEQ ID NO: 823842 - RNA, 20 nt, Artificial Sequence
  Synthetic
ugaacuggaguuugagucuu

SEQ ID NO: 823843 - RNA, 20 nt, Artificial Sequence
  Synthetic
aauucaaauucaauagucuu

SEQ ID NO: 823844 - RNA, 20 nt, Artificial Sequence
  Synthetic
acaaauuauuaccuagucuu

SEQ ID NO: 823845 - RNA, 20 nt, Artificial Sequence
  Synthetic
acuucccaaccccuagucuu

SEQ ID NO: 823846 - RNA, 20 nt, Artificial Sequence
  Synthetic
cuucuuccugguuuagucuu

SEQ ID NO: 823847 - RNA, 20 nt, Artificial Sequence
  Synthetic
uuucuuccugguuuagucuu

SEQ ID NO: 823848 - RNA, 20 nt, Artificial Sequence
  Synthetic
uuuucguagcaccaggucuu

SEQ ID NO: 823849 - RNA, 20 nt, Artificial Sequence
  Synthetic
uuuuuaugguuucaggucuu

SEQ ID NO: 823850 - RNA, 20 nt, Artificial Sequence
  Synthetic
cugccacuggcggaggucuu

SEQ ID NO: 823851 - RNA, 20 nt, Artificial Sequence
  Synthetic
uuuuucaucuccuaggucuu

SEQ ID NO: 823852 - RNA, 20 nt, Artificial Sequence
  Synthetic
agcacaauuuucuaggucuu

SEQ ID NO: 823853 - RNA, 20 nt, Artificial Sequence
  Synthetic
cauuuagggaauuaggucuu

SEQ ID NO: 823854 - RNA, 20 nt, Artificial Sequence
  Synthetic
uuuauaaauuacccggucuu

SEQ ID NO: 823855 - RNA, 20 nt, Artificial Sequence
  Synthetic
uuggguaacacugcggucuu

SEQ ID NO: 823856 - RNA, 20 nt, Artificial Sequence
  Synthetic
cguaacuugucuagggucuu

SEQ ID NO: 823857 - RNA, 20 nt, Artificial Sequence
  Synthetic
acaauuuuuuaaggggucuu

SEQ ID NO: 823858 - RNA, 20 nt, Artificial Sequence
  Synthetic
accuggagccccugggucuu

SEQ ID NO: 823859 - RNA, 20 nt, Artificial Sequence
  Synthetic
uuaauaaauuuucuggucuu

SEQ ID NO: 823860 - RNA, 20 nt, Artificial Sequence
  Synthetic
acugugaauucuguggucuu

SEQ ID NO: 823861 - RNA, 20 nt, Artificial Sequence
  Synthetic
uuuuuaggguuauuggucuu

SEQ ID NO: 823862 - RNA, 20 nt, Artificial Sequence
  Synthetic
auaguauccacaaaugucuu

SEQ ID NO: 823863 - RNA, 20 nt, Artificial Sequence
  Synthetic
aucagagaugcaaaugucuu

SEQ ID NO: 823864 - RNA, 20 nt, Artificial Sequence
  Synthetic
uuagguugauuccaugucuu

SEQ ID NO: 823865 - RNA, 20 nt, Artificial Sequence
  Synthetic
uauucaauaggggaugucuu

SEQ ID NO: 823866 - RNA, 20 nt, Artificial Sequence
  Synthetic
ugugauagacucuaugucuu

SEQ ID NO: 823867 - RNA, 20 nt, Artificial Sequence
  Synthetic
uucuuaugugcaacugucuu

SEQ ID NO: 823868 - RNA, 20 nt, Artificial Sequence
  Synthetic
agguccaagggaacugucuu

SEQ ID NO: 823869 - RNA, 20 nt, Artificial Sequence
  Synthetic
ccgaccccugcuacugucuu

SEQ ID NO: 823870 - RNA, 20 nt, Artificial Sequence
  Synthetic
cuaagggcuaacccugucuu

SEQ ID NO: 823871 - RNA, 20 nt, Artificial Sequence
  Synthetic
ccuaacuggcuggcugucuu

SEQ ID NO: 823872 - RNA, 20 nt, Artificial Sequence
  Synthetic
auccgauuauuaugugucuu

SEQ ID NO: 823873 - RNA, 20 nt, Artificial Sequence
  Synthetic
cagauuucuaaaauugucuu

SEQ ID NO: 823874 - RNA, 20 nt, Artificial Sequence
  Synthetic
uuuccaacaugucuugucuu

SEQ ID NO: 823875 - RNA, 20 nt, Artificial Sequence
  Synthetic
cuauaaaacaauguugucuu

SEQ ID NO: 823876 - RNA, 20 nt, Artificial Sequence
  Synthetic
auuuuucuuauuguugucuu

SEQ ID NO: 823877 - RNA, 20 nt, Artificial Sequence
  Synthetic
uuuucuucguuguuugucuu

SEQ ID NO: 823878 - RNA, 20 nt, Artificial Sequence
  Synthetic
aaucaugugguuuuugucuu

SEQ ID NO: 823879 - RNA, 20 nt, Artificial Sequence
  Synthetic
auaucugagaagaaauucuu

SEQ ID NO: 823880 - RNA, 20 nt, Artificial Sequence
  Synthetic
ucaagguagauuaaauucuu

SEQ ID NO: 823881 - RNA, 20 nt, Artificial Sequence
  Synthetic
agaugaggaauacaauucuu

SEQ ID NO: 823882 - RNA, 20 nt, Artificial Sequence
  Synthetic
cuggggagcuaccaauucuu

SEQ ID NO: 823883 - RNA, 20 nt, Artificial Sequence
  Synthetic
uuuagaaagaagcaauucuu

SEQ ID NO: 823884 - RNA, 20 nt, Artificial Sequence
  Synthetic
cagacuaugaaagaauucuu

SEQ ID NO: 823885 - RNA, 20 nt, Artificial Sequence
  Synthetic
ugcacccagcgugaauucuu

SEQ ID NO: 823886 - RNA, 20 nt, Artificial Sequence
  Synthetic
aaauuuguuuaauaauucuu

SEQ ID NO: 823887 - RNA, 20 nt, Artificial Sequence
  Synthetic
auuuuuauuugcuaauucuu

SEQ ID NO: 823888 - RNA, 20 nt, Artificial Sequence
  Synthetic
agaaugaacuucuaauucuu

SEQ ID NO: 823889 - RNA, 20 nt, Artificial Sequence
  Synthetic
aaagguagaagguaauucuu

SEQ ID NO: 823890 - RNA, 20 nt, Artificial Sequence
  Synthetic
agauucugguuuuaauucuu

SEQ ID NO: 823891 - RNA, 20 nt, Artificial Sequence
  Synthetic
aaccucauacuaacauucuu

SEQ ID NO: 823892 - RNA, 20 nt, Artificial Sequence
  Synthetic
ccccuacuucccccauucuu

SEQ ID NO: 823893 - RNA, 20 nt, Artificial Sequence
  Synthetic
caugcucacucugcauucuu

SEQ ID NO: 823894 - RNA, 20 nt, Artificial Sequence
  Synthetic
cugaagcaucucucauucuu

SEQ ID NO: 823895 - RNA, 20 nt, Artificial Sequence
  Synthetic
uagaacauuaauucauucuu

SEQ ID NO: 823896 - RNA, 20 nt, Artificial Sequence
  Synthetic
agcacauaagaaagauucuu

SEQ ID NO: 823897 - RNA, 20 nt, Artificial Sequence
  Synthetic
cugcacuacaaaggauucuu

SEQ ID NO: 823898 - RNA, 20 nt, Artificial Sequence
  Synthetic
aaacuuggcaauggauucuu

SEQ ID NO: 823899 - RNA, 20 nt, Artificial Sequence
  Synthetic
cacacuuuucccugauucuu

SEQ ID NO: 823900 - RNA, 20 nt, Artificial Sequence
  Synthetic
cuaccucauuucugauucuu

SEQ ID NO: 823901 - RNA, 20 nt, Artificial Sequence
  Synthetic
caaguucagggaauauucuu

SEQ ID NO: 823902 - RNA, 20 nt, Artificial Sequence
  Synthetic
aaugaggcuaguauauucuu

SEQ ID NO: 823903 - RNA, 20 nt, Artificial Sequence
  Synthetic
auaaccugcguuauauucuu

SEQ ID NO: 823904 - RNA, 20 nt, Artificial Sequence
  Synthetic
aguaaggaaggucuauucuu

SEQ ID NO: 823905 - RNA, 20 nt, Artificial Sequence
  Synthetic
uucaguagauaaguauucuu

SEQ ID NO: 823906 - RNA, 20 nt, Artificial Sequence
  Synthetic
agguuaauaucuguauucuu

SEQ ID NO: 823907 - RNA, 20 nt, Artificial Sequence
  Synthetic
agauaauugcaauuauucuu

SEQ ID NO: 823908 - RNA, 20 nt, Artificial Sequence
  Synthetic
aaaaaugaaguguuauucuu

SEQ ID NO: 823909 - RNA, 20 nt, Artificial Sequence
  Synthetic
uguacugguauaaacuucuu

SEQ ID NO: 823910 - RNA, 20 nt, Artificial Sequence
  Synthetic
auggagauuaggaacuucuu

SEQ ID NO: 823911 - RNA, 20 nt, Artificial Sequence
  Synthetic
aggugucuccugaacuucuu

SEQ ID NO: 823912 - RNA, 20 nt, Artificial Sequence
  Synthetic
caucuugccagccacuucuu

SEQ ID NO: 823913 - RNA, 20 nt, Artificial Sequence
  Synthetic
uuuuaugccuuggacuucuu

SEQ ID NO: 823914 - RNA, 20 nt, Artificial Sequence
  Synthetic
auaguaacaaaugacuucuu

SEQ ID NO: 823915 - RNA, 20 nt, Artificial Sequence
  Synthetic
uguuaauuuucucccuucuu

SEQ ID NO: 823916 - RNA, 20 nt, Artificial Sequence
  Synthetic
uuugaaaaacuucccuucuu

SEQ ID NO: 823917 - RNA, 20 nt, Artificial Sequence
  Synthetic
cccugaauaucagccuucuu

SEQ ID NO: 823918 - RNA, 20 nt, Artificial Sequence
  Synthetic
cuacuuguuuccuccuucuu

SEQ ID NO: 823919 - RNA, 20 nt, Artificial Sequence
  Synthetic
aggagauaucauuccuucuu

SEQ ID NO: 823920 - RNA, 20 nt, Artificial Sequence
  Synthetic
ucuaggaacgcuuccuucuu

SEQ ID NO: 823921 - RNA, 20 nt, Artificial Sequence
  Synthetic
cuggcuuuguugggcuucuu

SEQ ID NO: 823922 - RNA, 20 nt, Artificial Sequence
  Synthetic
acucauuucuauaucuucuu

SEQ ID NO: 823923 - RNA, 20 nt, Artificial Sequence
  Synthetic
cagcuuugucaacucuucuu

SEQ ID NO: 823924 - RNA, 20 nt, Artificial Sequence
  Synthetic
uccaauguauucuucuucuu

SEQ ID NO: 823925 - RNA, 20 nt, Artificial Sequence
  Synthetic
cacauaccggauuucuucuu

SEQ ID NO: 823926 - RNA, 20 nt, Artificial Sequence
  Synthetic
uaaugcacauuuuucuucuu

SEQ ID NO: 823927 - RNA, 20 nt, Artificial Sequence
  Synthetic
ccugucaaaggacaguucuu

SEQ ID NO: 823928 - RNA, 20 nt, Artificial Sequence
  Synthetic
aucucacugucucaguucuu

SEQ ID NO: 823929 - RNA, 20 nt, Artificial Sequence
  Synthetic
uauuucacgauucaguucuu

SEQ ID NO: 823930 - RNA, 20 nt, Artificial Sequence
  Synthetic
aagcugaaauauacguucuu

SEQ ID NO: 823931 - RNA, 20 nt, Artificial Sequence
  Synthetic
aaaauguguuucagguucuu

SEQ ID NO: 823932 - RNA, 20 nt, Artificial Sequence
  Synthetic
acuuuuuaaacuugguucuu

SEQ ID NO: 823933 - RNA, 20 nt, Artificial Sequence
  Synthetic
cagaggccaugaguguucuu

SEQ ID NO: 823934 - RNA, 20 nt, Artificial Sequence
  Synthetic
uugccaauccagaauuucuu

SEQ ID NO: 823935 - RNA, 20 nt, Artificial Sequence
  Synthetic
auauaauucuggaauuucuu

SEQ ID NO: 823936 - RNA, 20 nt, Artificial Sequence
  Synthetic
ugcugucuaucucauuucuu

SEQ ID NO: 823937 - RNA, 20 nt, Artificial Sequence
  Synthetic
aacacaacauaagauuucuu

SEQ ID NO: 823938 - RNA, 20 nt, Artificial Sequence
  Synthetic
cauguaauugcuuauuucuu

SEQ ID NO: 823939 - RNA, 20 nt, Artificial Sequence
  Synthetic
uguggucaacuuuauuucuu

SEQ ID NO: 823940 - RNA, 20 nt, Artificial Sequence
  Synthetic
cucuggauaaacacuuucuu

SEQ ID NO: 823941 - RNA, 20 nt, Artificial Sequence
  Synthetic
auacuuuaauagacuuucuu

SEQ ID NO: 823942 - RNA, 20 nt, Artificial Sequence
  Synthetic
uuuugaaaagcaccuuucuu

SEQ ID NO: 823943 - RNA, 20 nt, Artificial Sequence
  Synthetic
cagaagaaacagccuuucuu

SEQ ID NO: 823944 - RNA, 20 nt, Artificial Sequence
  Synthetic
auauacugauuuccuuucuu

SEQ ID NO: 823945 - RNA, 20 nt, Artificial Sequence
  Synthetic
uucuaugugccagcuuucuu

SEQ ID NO: 823946 - RNA, 20 nt, Artificial Sequence
  Synthetic
auauacugauuugcuuucuu

SEQ ID NO: 823947 - RNA, 20 nt, Artificial Sequence
  Synthetic
aucuugaugaauucuuucuu

SEQ ID NO: 823948 - RNA, 20 nt, Artificial Sequence
  Synthetic
uuaugaaaaaguucuuucuu

SEQ ID NO: 823949 - RNA, 20 nt, Artificial Sequence
  Synthetic
agaggggaauuuucuuucuu

SEQ ID NO: 823950 - RNA, 20 nt, Artificial Sequence
  Synthetic
uuggaauuuuuuucuuucuu

SEQ ID NO: 823951 - RNA, 20 nt, Artificial Sequence
  Synthetic
uccaucucaugugguuucuu

SEQ ID NO: 823952 - RNA, 20 nt, Artificial Sequence
  Synthetic
agggagcaauucuguuucuu

SEQ ID NO: 823953 - RNA, 20 nt, Artificial Sequence
  Synthetic
cauaaaguuuucuguuucuu

SEQ ID NO: 823954 - RNA, 20 nt, Artificial Sequence
  Synthetic
aaagaagaauccauuuucuu

SEQ ID NO: 823955 - RNA, 20 nt, Artificial Sequence
  Synthetic
cugugugauuccauuuucuu

SEQ ID NO: 823956 - RNA, 20 nt, Artificial Sequence
  Synthetic
aagugcuacagcauuuucuu

SEQ ID NO: 823957 - RNA, 20 nt, Artificial Sequence
  Synthetic
ugaaaaaguagcauuuucuu

SEQ ID NO: 823958 - RNA, 20 nt, Artificial Sequence
  Synthetic
uacaugggacucauuuucuu

SEQ ID NO: 823959 - RNA, 20 nt, Artificial Sequence
  Synthetic
caucacuuuaggauuuucuu

SEQ ID NO: 823960 - RNA, 20 nt, Artificial Sequence
  Synthetic
agaacgaaacauauuuucuu

SEQ ID NO: 823961 - RNA, 20 nt, Artificial Sequence
  Synthetic
uaaaaugacuaacuuuucuu

SEQ ID NO: 823962 - RNA, 20 nt, Artificial Sequence
  Synthetic
auauuaggguuacuuuucuu

SEQ ID NO: 823963 - RNA, 20 nt, Artificial Sequence
  Synthetic
aauauuguucaccuuuucuu

SEQ ID NO: 823964 - RNA, 20 nt, Artificial Sequence
  Synthetic
agauacaagaggcuuuucuu

SEQ ID NO: 823965 - RNA, 20 nt, Artificial Sequence
  Synthetic
aacuuucuuugucuuuucuu

SEQ ID NO: 823966 - RNA, 20 nt, Artificial Sequence
  Synthetic
uauuuuuucuuucuuuucuu

SEQ ID NO: 823967 - RNA, 20 nt, Artificial Sequence
  Synthetic
augcucugaagaguuuucuu

SEQ ID NO: 823968 - RNA, 20 nt, Artificial Sequence
  Synthetic
aauuguguagaauuuuucuu

SEQ ID NO: 823969 - RNA, 20 nt, Artificial Sequence
  Synthetic
cuagaccugauauuuuucuu

SEQ ID NO: 823970 - RNA, 20 nt, Artificial Sequence
  Synthetic
auuguuuuugccuuuuucuu

SEQ ID NO: 823971 - RNA, 20 nt, Artificial Sequence
  Synthetic
uuguacuuuuucuuuuucuu

SEQ ID NO: 823972 - RNA, 20 nt, Artificial Sequence
  Synthetic
cccuuauagcaguuuuucuu

SEQ ID NO: 823973 - RNA, 20 nt, Artificial Sequence
  Synthetic
augucuuuggaaaaaaaguu

SEQ ID NO: 823974 - RNA, 20 nt, Artificial Sequence
  Synthetic
aaguggaggaggaaaaaguu

SEQ ID NO: 823975 - RNA, 20 nt, Artificial Sequence
  Synthetic
ugggguuggaggaaaaaguu

SEQ ID NO: 823976 - RNA, 20 nt, Artificial Sequence
  Synthetic
uagggugaggggaaaaaguu

SEQ ID NO: 823977 - RNA, 20 nt, Artificial Sequence
  Synthetic
cuucuuucccugaaaaaguu

SEQ ID NO: 823978 - RNA, 20 nt, Artificial Sequence
  Synthetic
ucauauuuuaauaaaaaguu

SEQ ID NO: 823979 - RNA, 20 nt, Artificial Sequence
  Synthetic
uccuugaggaugcaaaaguu

SEQ ID NO: 823980 - RNA, 20 nt, Artificial Sequence
  Synthetic
cagcauaaauuucaaaaguu

SEQ ID NO: 823981 - RNA, 20 nt, Artificial Sequence
  Synthetic
caggaaaauguggaaaaguu

SEQ ID NO: 823982 - RNA, 20 nt, Artificial Sequence
  Synthetic
aucucuuagaaguaaaaguu

SEQ ID NO: 823983 - RNA, 20 nt, Artificial Sequence
  Synthetic
aaggucauaucuuaaaaguu

SEQ ID NO: 823984 - RNA, 20 nt, Artificial Sequence
  Synthetic
uaucugaaauguuaaaaguu

SEQ ID NO: 823985 - RNA, 20 nt, Artificial Sequence
  Synthetic
ugcuacaguuucacaaaguu

SEQ ID NO: 823986 - RNA, 20 nt, Artificial Sequence
  Synthetic
ucagagaaggaaucaaaguu

SEQ ID NO: 823987 - RNA, 20 nt, Artificial Sequence
  Synthetic
auaguuauuuuaagaaaguu

SEQ ID NO: 823988 - RNA, 20 nt, Artificial Sequence
  Synthetic
aaauuauccuucagaaaguu

SEQ ID NO: 823989 - RNA, 20 nt, Artificial Sequence
  Synthetic
uagauuaugugucgaaaguu

SEQ ID NO: 823990 - RNA, 20 nt, Artificial Sequence
  Synthetic
caggaagaugugggaaaguu

SEQ ID NO: 823991 - RNA, 20 nt, Artificial Sequence
  Synthetic
uaaauucaacgcauaaaguu

SEQ ID NO: 823992 - RNA, 20 nt, Artificial Sequence
  Synthetic
agaagauucaaccuaaaguu

SEQ ID NO: 823993 - RNA, 20 nt, Artificial Sequence
  Synthetic
ucuggcaaaaaauuaaaguu

SEQ ID NO: 823994 - RNA, 20 nt, Artificial Sequence
  Synthetic
acacaucaaacauuaaaguu

SEQ ID NO: 823995 - RNA, 20 nt, Artificial Sequence
  Synthetic
acaaaauguuuuuuaaaguu

SEQ ID NO: 823996 - RNA, 20 nt, Artificial Sequence
  Synthetic
accgcuuugagaaacaaguu

SEQ ID NO: 823997 - RNA, 20 nt, Artificial Sequence
  Synthetic
cuaaaaguguuaaacaaguu

SEQ ID NO: 823998 - RNA, 20 nt, Artificial Sequence
  Synthetic
uuaaaucuauagaacaaguu

SEQ ID NO: 823999 - RNA, 20 nt, Artificial Sequence
  Synthetic
aucacagacuagaacaaguu

SEQ ID NO: 824000 - RNA, 20 nt, Artificial Sequence
  Synthetic
agauaaaaccauaacaaguu

SEQ ID NO: 824001 - RNA, 20 nt, Artificial Sequence
  Synthetic
ugagauacuugccacaaguu

SEQ ID NO: 824002 - RNA, 20 nt, Artificial Sequence
  Synthetic
agggugcagagauacaaguu

SEQ ID NO: 824003 - RNA, 20 nt, Artificial Sequence
  Synthetic
caugacuuuugguacaaguu

SEQ ID NO: 824004 - RNA, 20 nt, Artificial Sequence
  Synthetic
aaagaauccauugccaaguu

SEQ ID NO: 824005 - RNA, 20 nt, Artificial Sequence
  Synthetic
ugcaauaauuauuccaaguu

SEQ ID NO: 824006 - RNA, 20 nt, Artificial Sequence
  Synthetic
caguauuuucugagcaaguu

SEQ ID NO: 824007 - RNA, 20 nt, Artificial Sequence
  Synthetic
aacauauagggaggcaaguu

SEQ ID NO: 824008 - RNA, 20 nt, Artificial Sequence
  Synthetic
uuuuaugauuuaggcaaguu

SEQ ID NO: 824009 - RNA, 20 nt, Artificial Sequence
  Synthetic
uuuccuuauaugggcaaguu

SEQ ID NO: 824010 - RNA, 20 nt, Artificial Sequence
  Synthetic
ugacccaugggcuucaaguu

SEQ ID NO: 824011 - RNA, 20 nt, Artificial Sequence
  Synthetic
uuauuuuaagucaagaaguu

SEQ ID NO: 824012 - RNA, 20 nt, Artificial Sequence
  Synthetic
aggaacacugcagagaaguu

SEQ ID NO: 824013 - RNA, 20 nt, Artificial Sequence
  Synthetic
ucccaagauccuuagaaguu

SEQ ID NO: 824014 - RNA, 20 nt, Artificial Sequence
  Synthetic
cacacuuauuuuuagaaguu

SEQ ID NO: 824015 - RNA, 20 nt, Artificial Sequence
  Synthetic
uaagcagaaaauacgaaguu

SEQ ID NO: 824016 - RNA, 20 nt, Artificial Sequence
  Synthetic
aucagaaaaugaaggaaguu

SEQ ID NO: 824017 - RNA, 20 nt, Artificial Sequence
  Synthetic
uggacugcugacaggaaguu

SEQ ID NO: 824018 - RNA, 20 nt, Artificial Sequence
  Synthetic
ucauauaguaaugggaaguu

SEQ ID NO: 824019 - RNA, 20 nt, Artificial Sequence
  Synthetic
uucguugaggaugggaaguu

SEQ ID NO: 824020 - RNA, 20 nt, Artificial Sequence
  Synthetic
uuucuaguaaacuggaaguu

SEQ ID NO: 824021 - RNA, 20 nt, Artificial Sequence
  Synthetic
ccuugauuauaaaugaaguu

SEQ ID NO: 824022 - RNA, 20 nt, Artificial Sequence
  Synthetic
uaagaugaaagccugaaguu

SEQ ID NO: 824023 - RNA, 20 nt, Artificial Sequence
  Synthetic
uuaaauguccuagugaaguu

SEQ ID NO: 824024 - RNA, 20 nt, Artificial Sequence
  Synthetic
agaauucaagaauugaaguu

SEQ ID NO: 824025 - RNA, 20 nt, Artificial Sequence
  Synthetic
ugugaauggguauugaaguu

SEQ ID NO: 824026 - RNA, 20 nt, Artificial Sequence
  Synthetic
agcuggaaguuauugaaguu

SEQ ID NO: 824027 - RNA, 20 nt, Artificial Sequence
  Synthetic
agaaaggaauucuugaaguu

SEQ ID NO: 824028 - RNA, 20 nt, Artificial Sequence
  Synthetic
ccaaaaaugagaaauaaguu

SEQ ID NO: 824029 - RNA, 20 nt, Artificial Sequence
  Synthetic
auacgcuauuuaaauaaguu

SEQ ID NO: 824030 - RNA, 20 nt, Artificial Sequence
  Synthetic
caauaacaccagaauaaguu

SEQ ID NO: 824031 - RNA, 20 nt, Artificial Sequence
  Synthetic
auuaaauuuuaccauaaguu

SEQ ID NO: 824032 - RNA, 20 nt, Artificial Sequence
  Synthetic
aauugagauacagauaaguu

SEQ ID NO: 824033 - RNA, 20 nt, Artificial Sequence
  Synthetic
cuacuuuaggacacuaaguu

SEQ ID NO: 824034 - RNA, 20 nt, Artificial Sequence
  Synthetic
caagugacagaagcuaaguu

SEQ ID NO: 824035 - RNA, 20 nt, Artificial Sequence
  Synthetic
aaguuagaccuuaguaaguu

SEQ ID NO: 824036 - RNA, 20 nt, Artificial Sequence
  Synthetic
uagagaacucuuuguaaguu

SEQ ID NO: 824037 - RNA, 20 nt, Artificial Sequence
  Synthetic
uacugguaguuuuguaaguu

SEQ ID NO: 824038 - RNA, 20 nt, Artificial Sequence
  Synthetic
uaaagauacaaaauuaaguu

SEQ ID NO: 824039 - RNA, 20 nt, Artificial Sequence
  Synthetic
ucucuuccuguaauuaaguu

SEQ ID NO: 824040 - RNA, 20 nt, Artificial Sequence
  Synthetic
acaucugguaauauuaaguu

SEQ ID NO: 824041 - RNA, 20 nt, Artificial Sequence
  Synthetic
cagggcaagaaaguuaaguu

SEQ ID NO: 824042 - RNA, 20 nt, Artificial Sequence
  Synthetic
uaagucuuuauaguuaaguu

SEQ ID NO: 824043 - RNA, 20 nt, Artificial Sequence
  Synthetic
agaaaaaaaaauguuaaguu

SEQ ID NO: 824044 - RNA, 20 nt, Artificial Sequence
  Synthetic
aaacaacuuugaaaacaguu

SEQ ID NO: 824045 - RNA, 20 nt, Artificial Sequence
  Synthetic
acuuaccacuacaaacaguu

SEQ ID NO: 824046 - RNA, 20 nt, Artificial Sequence
  Synthetic
aggcagagguugaaacaguu

SEQ ID NO: 824047 - RNA, 20 nt, Artificial Sequence
  Synthetic
cuuaauacaguuaaacaguu

SEQ ID NO: 824048 - RNA, 20 nt, Artificial Sequence
  Synthetic
cccaugcagggacaacaguu

SEQ ID NO: 824049 - RNA, 20 nt, Artificial Sequence
  Synthetic
aaccacuauagagaacaguu

SEQ ID NO: 824050 - RNA, 20 nt, Artificial Sequence
  Synthetic
aggcacagguuggaacaguu

SEQ ID NO: 824051 - RNA, 20 nt, Artificial Sequence
  Synthetic
aggcagggguuggaacaguu

SEQ ID NO: 824052 - RNA, 20 nt, Artificial Sequence
  Synthetic
uuucauaacuuugaacaguu

SEQ ID NO: 824053 - RNA, 20 nt, Artificial Sequence
  Synthetic
agauugccugaaacacaguu

SEQ ID NO: 824054 - RNA, 20 nt, Artificial Sequence
  Synthetic
caggacugucuaacacaguu

SEQ ID NO: 824055 - RNA, 20 nt, Artificial Sequence
  Synthetic
cagccucuguccacacaguu

SEQ ID NO: 824056 - RNA, 20 nt, Artificial Sequence
  Synthetic
uuccccuaacgugcacaguu

SEQ ID NO: 824057 - RNA, 20 nt, Artificial Sequence
  Synthetic
ugaguuuaugauucacaguu

SEQ ID NO: 824058 - RNA, 20 nt, Artificial Sequence
  Synthetic
auaauucaguuuucacaguu

SEQ ID NO: 824059 - RNA, 20 nt, Artificial Sequence
  Synthetic
aaaaacaaaaagggacaguu

SEQ ID NO: 824060 - RNA, 20 nt, Artificial Sequence
  Synthetic
aaggaaaaugugggacaguu

SEQ ID NO: 824061 - RNA, 20 nt, Artificial Sequence
  Synthetic
auuacuuuuuaaauacaguu

SEQ ID NO: 824062 - RNA, 20 nt, Artificial Sequence
  Synthetic
acuuacauuagccuacaguu

SEQ ID NO: 824063 - RNA, 20 nt, Artificial Sequence
  Synthetic
auauuuaccuuccuacaguu

SEQ ID NO: 824064 - RNA, 20 nt, Artificial Sequence
  Synthetic
uggcaggauucaguacaguu

SEQ ID NO: 824065 - RNA, 20 nt, Artificial Sequence
  Synthetic
aaaggggccaagguacaguu

SEQ ID NO: 824066 - RNA, 20 nt, Artificial Sequence
  Synthetic
augcagagucugguacaguu

SEQ ID NO: 824067 - RNA, 20 nt, Artificial Sequence
  Synthetic
aaauuuuauuacucccaguu

SEQ ID NO: 824068 - RNA, 20 nt, Artificial Sequence
  Synthetic
ccaaagacagccagccaguu

SEQ ID NO: 824069 - RNA, 20 nt, Artificial Sequence
  Synthetic
caugguuaccauuuccaguu

SEQ ID NO: 824070 - RNA, 20 nt, Artificial Sequence
  Synthetic
agccacuguagaaagcaguu

SEQ ID NO: 824071 - RNA, 20 nt, Artificial Sequence
  Synthetic
acccacuguggaaagcaguu

SEQ ID NO: 824072 - RNA, 20 nt, Artificial Sequence
  Synthetic
agccacuguggaaagcaguu

SEQ ID NO: 824073 - RNA, 20 nt, Artificial Sequence
  Synthetic
auuggggaaaucuagcaguu

SEQ ID NO: 824074 - RNA, 20 nt, Artificial Sequence
  Synthetic
accucuuguggaaggcaguu

SEQ ID NO: 824075 - RNA, 20 nt, Artificial Sequence
  Synthetic
agaugugaacucaggcaguu

SEQ ID NO: 824076 - RNA, 20 nt, Artificial Sequence
  Synthetic
uuauucauggagcugcaguu

SEQ ID NO: 824077 - RNA, 20 nt, Artificial Sequence
  Synthetic
ucagcuaacaugcugcaguu

SEQ ID NO: 824078 - RNA, 20 nt, Artificial Sequence
  Synthetic
uuugaaugcccauugcaguu

SEQ ID NO: 824079 - RNA, 20 nt, Artificial Sequence
  Synthetic
aagauacugcaaaaucaguu

SEQ ID NO: 824080 - RNA, 20 nt, Artificial Sequence
  Synthetic
cuuaugcuucauaaucaguu

SEQ ID NO: 824081 - RNA, 20 nt, Artificial Sequence
  Synthetic
uguuucaguugauaucaguu

SEQ ID NO: 824082 - RNA, 20 nt, Artificial Sequence
  Synthetic
ugggaauuuguuuaucaguu

SEQ ID NO: 824083 - RNA, 20 nt, Artificial Sequence
  Synthetic
cacuucugaauuucucaguu

SEQ ID NO: 824084 - RNA, 20 nt, Artificial Sequence
  Synthetic
aaacucauacaaauucaguu

SEQ ID NO: 824085 - RNA, 20 nt, Artificial Sequence
  Synthetic
acaaggucgaacauucaguu

SEQ ID NO: 824086 - RNA, 20 nt, Artificial Sequence
  Synthetic
uuacaaaacuuuauucaguu

SEQ ID NO: 824087 - RNA, 20 nt, Artificial Sequence
  Synthetic
uacucacucauucuucaguu

SEQ ID NO: 824088 - RNA, 20 nt, Artificial Sequence
  Synthetic
caguugucauuauuucaguu

SEQ ID NO: 824089 - RNA, 20 nt, Artificial Sequence
  Synthetic
ccauugaaugacuuucaguu

SEQ ID NO: 824090 - RNA, 20 nt, Artificial Sequence
  Synthetic
ugaguaccugaguuucaguu

SEQ ID NO: 824091 - RNA, 20 nt, Artificial Sequence
  Synthetic
cauagagaaguguuucaguu

SEQ ID NO: 824092 - RNA, 20 nt, Artificial Sequence
  Synthetic
uuacuucauccuuuucaguu

SEQ ID NO: 824093 - RNA, 20 nt, Artificial Sequence
  Synthetic
cuggccucauaaaaagaguu

SEQ ID NO: 824094 - RNA, 20 nt, Artificial Sequence
  Synthetic
auauauaaaaucaaagaguu

SEQ ID NO: 824095 - RNA, 20 nt, Artificial Sequence
  Synthetic
cuaagccauaauaaagaguu

SEQ ID NO: 824096 - RNA, 20 nt, Artificial Sequence
  Synthetic
uuuaauuggaugcaagaguu

SEQ ID NO: 824097 - RNA, 20 nt, Artificial Sequence
  Synthetic
uugcuacuuuuucaagaguu

SEQ ID NO: 824098 - RNA, 20 nt, Artificial Sequence
  Synthetic
aaacuuuuaugagaagaguu

SEQ ID NO: 824099 - RNA, 20 nt, Artificial Sequence
  Synthetic
uaaugucaugaauaagaguu

SEQ ID NO: 824100 - RNA, 20 nt, Artificial Sequence
  Synthetic
uuuuucacaguguaagaguu

SEQ ID NO: 824101 - RNA, 20 nt, Artificial Sequence
  Synthetic
aggauauccacuuaagaguu

SEQ ID NO: 824102 - RNA, 20 nt, Artificial Sequence
  Synthetic
aguucuuggaacacagaguu

SEQ ID NO: 824103 - RNA, 20 nt, Artificial Sequence
  Synthetic
caucacguauuaccagaguu

SEQ ID NO: 824104 - RNA, 20 nt, Artificial Sequence
  Synthetic
ucuccauccagcccagaguu

SEQ ID NO: 824105 - RNA, 20 nt, Artificial Sequence
  Synthetic
uccccuguccccucagaguu

SEQ ID NO: 824106 - RNA, 20 nt, Artificial Sequence
  Synthetic
ccagaaaaguccucagaguu

SEQ ID NO: 824107 - RNA, 20 nt, Artificial Sequence
  Synthetic
ucacaaguuuauucagaguu

SEQ ID NO: 824108 - RNA, 20 nt, Artificial Sequence
  Synthetic
acaaacaugugcagagaguu

SEQ ID NO: 824109 - RNA, 20 nt, Artificial Sequence
  Synthetic
agucuucuaggaggagaguu

SEQ ID NO: 824110 - RNA, 20 nt, Artificial Sequence
  Synthetic
ucccugugugggugagaguu

SEQ ID NO: 824111 - RNA, 20 nt, Artificial Sequence
  Synthetic
uuuguauuuuuaguagaguu

SEQ ID NO: 824112 - RNA, 20 nt, Artificial Sequence
  Synthetic
uguggugcagcuguagaguu

SEQ ID NO: 824113 - RNA, 20 nt, Artificial Sequence
  Synthetic
uuaaaaaaauggaaggaguu

SEQ ID NO: 824114 - RNA, 20 nt, Artificial Sequence
  Synthetic
aacacugccccuaaggaguu

SEQ ID NO: 824115 - RNA, 20 nt, Artificial Sequence
  Synthetic
ccgauaagaucgcaggaguu

SEQ ID NO: 824116 - RNA, 20 nt, Artificial Sequence
  Synthetic
uaucaacauuaucaggaguu

SEQ ID NO: 824117 - RNA, 20 nt, Artificial Sequence
  Synthetic
aucugcagagcagaggaguu

SEQ ID NO: 824118 - RNA, 20 nt, Artificial Sequence
  Synthetic
cugaaaucaacauaggaguu

SEQ ID NO: 824119 - RNA, 20 nt, Artificial Sequence
  Synthetic
ugccugggaaaguaggaguu

SEQ ID NO: 824120 - RNA, 20 nt, Artificial Sequence
  Synthetic
aaggaagucagaggggaguu

SEQ ID NO: 824121 - RNA, 20 nt, Artificial Sequence
  Synthetic
aaaagaggcaaaugggaguu

SEQ ID NO: 824122 - RNA, 20 nt, Artificial Sequence
  Synthetic
aauugcaugucaugggaguu

SEQ ID NO: 824123 - RNA, 20 nt, Artificial Sequence
  Synthetic
uugaagaguugaugggaguu

SEQ ID NO: 824124 - RNA, 20 nt, Artificial Sequence
  Synthetic
cuaauaggugggugggaguu

SEQ ID NO: 824125 - RNA, 20 nt, Artificial Sequence
  Synthetic
ucuucugcuuggugggaguu

SEQ ID NO: 824126 - RNA, 20 nt, Artificial Sequence
  Synthetic
uuaaaauaacaacuggaguu

SEQ ID NO: 824127 - RNA, 20 nt, Artificial Sequence
  Synthetic
uuaaaagauuucuuggaguu

SEQ ID NO: 824128 - RNA, 20 nt, Artificial Sequence
  Synthetic
cuggccucauaaaaugaguu

SEQ ID NO: 824129 - RNA, 20 nt, Artificial Sequence
  Synthetic
accugaucuuugaaugaguu

SEQ ID NO: 824130 - RNA, 20 nt, Artificial Sequence
  Synthetic
ugcauagaacuugaugaguu

SEQ ID NO: 824131 - RNA, 20 nt, Artificial Sequence
  Synthetic
agcaggugaaaauaugaguu

SEQ ID NO: 824132 - RNA, 20 nt, Artificial Sequence
  Synthetic
caacugaauuuguaugaguu

SEQ ID NO: 824133 - RNA, 20 nt, Artificial Sequence
  Synthetic
cccaguguaauaacugaguu

SEQ ID NO: 824134 - RNA, 20 nt, Artificial Sequence
  Synthetic
uauggcugaagcacugaguu

SEQ ID NO: 824135 - RNA, 20 nt, Artificial Sequence
  Synthetic
caggaugaaaauucugaguu

SEQ ID NO: 824136 - RNA, 20 nt, Artificial Sequence
  Synthetic
aaggugaaaacaagugaguu

SEQ ID NO: 824137 - RNA, 20 nt, Artificial Sequence
  Synthetic
aauggccucauaagugaguu

SEQ ID NO: 824138 - RNA, 20 nt, Artificial Sequence
  Synthetic
augauuuaacucagugaguu

SEQ ID NO: 824139 - RNA, 20 nt, Artificial Sequence
  Synthetic
aagucuuauuguggugaguu

SEQ ID NO: 824140 - RNA, 20 nt, Artificial Sequence
  Synthetic
agugaucucaugugugaguu

SEQ ID NO: 824141 - RNA, 20 nt, Artificial Sequence
  Synthetic
agcuacaaaggaauugaguu

SEQ ID NO: 824142 - RNA, 20 nt, Artificial Sequence
  Synthetic
uaguugaaaugaauugaguu

SEQ ID NO: 824143 - RNA, 20 nt, Artificial Sequence
  Synthetic
aaugaagucugaauugaguu

SEQ ID NO: 824144 - RNA, 20 nt, Artificial Sequence
  Synthetic
uauauaacugagauugaguu

SEQ ID NO: 824145 - RNA, 20 nt, Artificial Sequence
  Synthetic
uguccauggaaauuugaguu

SEQ ID NO: 824146 - RNA, 20 nt, Artificial Sequence
  Synthetic
acauuggcagaauuugaguu

SEQ ID NO: 824147 - RNA, 20 nt, Artificial Sequence
  Synthetic
uaguuuuagccuuuugaguu

SEQ ID NO: 824148 - RNA, 20 nt, Artificial Sequence
  Synthetic
cuaggauauuaaaaauaguu

SEQ ID NO: 824149 - RNA, 20 nt, Artificial Sequence
  Synthetic
uaaaaacacgagaaauaguu

SEQ ID NO: 824150 - RNA, 20 nt, Artificial Sequence
  Synthetic
ucauuaaggagccaauaguu

SEQ ID NO: 824151 - RNA, 20 nt, Artificial Sequence
  Synthetic
agaucuuuucugcaauaguu

SEQ ID NO: 824152 - RNA, 20 nt, Artificial Sequence
  Synthetic
aaccaaaauggagaauaguu

SEQ ID NO: 824153 - RNA, 20 nt, Artificial Sequence
  Synthetic
uuagcuucuugauaauaguu

SEQ ID NO: 824154 - RNA, 20 nt, Artificial Sequence
  Synthetic
uacaagagacccuaauaguu

SEQ ID NO: 824155 - RNA, 20 nt, Artificial Sequence
  Synthetic
uaaaagaagguguaauaguu

SEQ ID NO: 824156 - RNA, 20 nt, Artificial Sequence
  Synthetic
auuauauuuauaccauaguu

SEQ ID NO: 824157 - RNA, 20 nt, Artificial Sequence
  Synthetic
uggucuugcaggccauaguu

SEQ ID NO: 824158 - RNA, 20 nt, Artificial Sequence
  Synthetic
cuuucaguucuggcauaguu

SEQ ID NO: 824159 - RNA, 20 nt, Artificial Sequence
  Synthetic
uuaaagauaauaucauaguu

SEQ ID NO: 824160 - RNA, 20 nt, Artificial Sequence
  Synthetic
auauauauggacucauaguu

SEQ ID NO: 824161 - RNA, 20 nt, Artificial Sequence
  Synthetic
augauuaagucaggauaguu

SEQ ID NO: 824162 - RNA, 20 nt, Artificial Sequence
  Synthetic
cuuccauaguaaauauaguu

SEQ ID NO: 824163 - RNA, 20 nt, Artificial Sequence
  Synthetic
aauaguuuauucauauaguu

SEQ ID NO: 824164 - RNA, 20 nt, Artificial Sequence
  Synthetic
acaugagcccugauauaguu

SEQ ID NO: 824165 - RNA, 20 nt, Artificial Sequence
  Synthetic
uuuacaaacacuguauaguu

SEQ ID NO: 824166 - RNA, 20 nt, Artificial Sequence
  Synthetic
uaacuuccaaauuuauaguu

SEQ ID NO: 824167 - RNA, 20 nt, Artificial Sequence
  Synthetic
ugaaauaucugcaacuaguu

SEQ ID NO: 824168 - RNA, 20 nt, Artificial Sequence
  Synthetic
ugauaacuuccauacuaguu

SEQ ID NO: 824169 - RNA, 20 nt, Artificial Sequence
  Synthetic
uuccuccaagguuacuaguu

SEQ ID NO: 824170 - RNA, 20 nt, Artificial Sequence
  Synthetic
ugccuagguuuuuacuaguu

SEQ ID NO: 824171 - RNA, 20 nt, Artificial Sequence
  Synthetic
auuugaucucacuccuaguu

SEQ ID NO: 824172 - RNA, 20 nt, Artificial Sequence
  Synthetic
acuuguacauguuccuaguu

SEQ ID NO: 824173 - RNA, 20 nt, Artificial Sequence
  Synthetic
cuaacacaagaaagcuaguu

SEQ ID NO: 824174 - RNA, 20 nt, Artificial Sequence
  Synthetic
uuuauuuggacaugcuaguu

SEQ ID NO: 824175 - RNA, 20 nt, Artificial Sequence
  Synthetic
uuccuuucuuggaucuaguu

SEQ ID NO: 824176 - RNA, 20 nt, Artificial Sequence
  Synthetic
aggaagcacacacucuaguu

SEQ ID NO: 824177 - RNA, 20 nt, Artificial Sequence
  Synthetic
uuggaguuugcauucuaguu

SEQ ID NO: 824178 - RNA, 20 nt, Artificial Sequence
  Synthetic
uguuuagaaaaguucuaguu

SEQ ID NO: 824179 - RNA, 20 nt, Artificial Sequence
  Synthetic
acaaauccauauuucuaguu

SEQ ID NO: 824180 - RNA, 20 nt, Artificial Sequence
  Synthetic
auuagguuuuuuuucuaguu

SEQ ID NO: 824181 - RNA, 20 nt, Artificial Sequence
  Synthetic
acaacagauacgaaguaguu

SEQ ID NO: 824182 - RNA, 20 nt, Artificial Sequence
  Synthetic
uuggaauaauauaaguaguu

SEQ ID NO: 824183 - RNA, 20 nt, Artificial Sequence
  Synthetic
aauaagauugcagaguaguu

SEQ ID NO: 824184 - RNA, 20 nt, Artificial Sequence
  Synthetic
ccucugccucccgaguaguu

SEQ ID NO: 824185 - RNA, 20 nt, Artificial Sequence
  Synthetic
ccucagccuccugaguaguu

SEQ ID NO: 824186 - RNA, 20 nt, Artificial Sequence
  Synthetic
ucacaaugccauauguaguu

SEQ ID NO: 824187 - RNA, 20 nt, Artificial Sequence
  Synthetic
aagcaauuugauauguaguu

SEQ ID NO: 824188 - RNA, 20 nt, Artificial Sequence
  Synthetic
aauuauuggacuauguaguu

SEQ ID NO: 824189 - RNA, 20 nt, Artificial Sequence
  Synthetic
aucauugcauugguguaguu

SEQ ID NO: 824190 - RNA, 20 nt, Artificial Sequence
  Synthetic
uacagcuuuuacuuguaguu

SEQ ID NO: 824191 - RNA, 20 nt, Artificial Sequence
  Synthetic
aaacauuuguaguuguaguu

SEQ ID NO: 824192 - RNA, 20 nt, Artificial Sequence
  Synthetic
uaaaguacaaaaaauuaguu

SEQ ID NO: 824193 - RNA, 20 nt, Artificial Sequence
  Synthetic
uaaaaauacaaaaauuaguu

SEQ ID NO: 824194 - RNA, 20 nt, Artificial Sequence
  Synthetic
uauuuuuaugaaaauuaguu

SEQ ID NO: 824195 - RNA, 20 nt, Artificial Sequence
  Synthetic
auuuaaauaaugaauuaguu

SEQ ID NO: 824196 - RNA, 20 nt, Artificial Sequence
  Synthetic
agucucccuugccauuaguu

SEQ ID NO: 824197 - RNA, 20 nt, Artificial Sequence
  Synthetic
uuugcuuaugaaacuuaguu

SEQ ID NO: 824198 - RNA, 20 nt, Artificial Sequence
  Synthetic
cuauaaccugugacuuaguu

SEQ ID NO: 824199 - RNA, 20 nt, Artificial Sequence
  Synthetic
uucacuuaugaagcuuaguu

SEQ ID NO: 824200 - RNA, 20 nt, Artificial Sequence
  Synthetic
uuugcuuaugaagcuuaguu

SEQ ID NO: 824201 - RNA, 20 nt, Artificial Sequence
  Synthetic
uuuuagagaauaucuuaguu

SEQ ID NO: 824202 - RNA, 20 nt, Artificial Sequence
  Synthetic
ccuaacauuuaagguuaguu

SEQ ID NO: 824203 - RNA, 20 nt, Artificial Sequence
  Synthetic
cauucaucugguauuuaguu

SEQ ID NO: 824204 - RNA, 20 nt, Artificial Sequence
  Synthetic
caccuugugacauuuuaguu

SEQ ID NO: 824205 - RNA, 20 nt, Artificial Sequence
  Synthetic
auaaucugugacuuuuaguu

SEQ ID NO: 824206 - RNA, 20 nt, Artificial Sequence
  Synthetic
aucuaggauaccuuuuaguu

SEQ ID NO: 824207 - RNA, 20 nt, Artificial Sequence
  Synthetic
cuauugaggagaaaaacguu

SEQ ID NO: 824208 - RNA, 20 nt, Artificial Sequence
  Synthetic
aaaaaacaacagggaacguu

SEQ ID NO: 824209 - RNA, 20 nt, Artificial Sequence
  Synthetic
cauaaaugugagauaacguu

SEQ ID NO: 824210 - RNA, 20 nt, Artificial Sequence
  Synthetic
uaugaauuauucuuaacguu

SEQ ID NO: 824211 - RNA, 20 nt, Artificial Sequence
  Synthetic
uacauucuccuuuuaacguu

SEQ ID NO: 824212 - RNA, 20 nt, Artificial Sequence
  Synthetic
uugcaucuuccucccacguu

SEQ ID NO: 824213 - RNA, 20 nt, Artificial Sequence
  Synthetic
agaauauuugaggccacguu

SEQ ID NO: 824214 - RNA, 20 nt, Artificial Sequence
  Synthetic
ucucccggugcugccacguu

SEQ ID NO: 824215 - RNA, 20 nt, Artificial Sequence
  Synthetic
uguuuccugaaaagcacguu

SEQ ID NO: 824216 - RNA, 20 nt, Artificial Sequence
  Synthetic
ugucccaaacugugcacguu

SEQ ID NO: 824217 - RNA, 20 nt, Artificial Sequence
  Synthetic
ucucaggcuucaaauacguu

SEQ ID NO: 824218 - RNA, 20 nt, Artificial Sequence
  Synthetic
agcaauuauuaucauacguu

SEQ ID NO: 824219 - RNA, 20 nt, Artificial Sequence
  Synthetic
aaccacuauggagaaccguu

SEQ ID NO: 824220 - RNA, 20 nt, Artificial Sequence
  Synthetic
uuauauauuuauuggccguu

SEQ ID NO: 824221 - RNA, 20 nt, Artificial Sequence
  Synthetic
auggugucagaguauccguu

SEQ ID NO: 824222 - RNA, 20 nt, Artificial Sequence
  Synthetic
uuagcuggcugggcuccguu

SEQ ID NO: 824223 - RNA, 20 nt, Artificial Sequence
  Synthetic
ucuuuuuuuucaauuccguu

SEQ ID NO: 824224 - RNA, 20 nt, Artificial Sequence
  Synthetic
acuguaugagagcaggcguu

SEQ ID NO: 824225 - RNA, 20 nt, Artificial Sequence
  Synthetic
cagagagaaauauuugcguu

SEQ ID NO: 824226 - RNA, 20 nt, Artificial Sequence
  Synthetic
caacauagugaaaccucguu

SEQ ID NO: 824227 - RNA, 20 nt, Artificial Sequence
  Synthetic
uguuuugaucuuuucucguu

SEQ ID NO: 824228 - RNA, 20 nt, Artificial Sequence
  Synthetic
ucccuguuguuuuuuucguu

SEQ ID NO: 824229 - RNA, 20 nt, Artificial Sequence
  Synthetic
uggagggaggcaaaaagguu

SEQ ID NO: 824230 - RNA, 20 nt, Artificial Sequence
  Synthetic
ucucuggugccgaaaagguu

SEQ ID NO: 824231 - RNA, 20 nt, Artificial Sequence
  Synthetic
augugaauaucuaaaagguu

SEQ ID NO: 824232 - RNA, 20 nt, Artificial Sequence
  Synthetic
agggaggaauggcaaagguu

SEQ ID NO: 824233 - RNA, 20 nt, Artificial Sequence
  Synthetic
agaguagaugcagaaagguu

SEQ ID NO: 824234 - RNA, 20 nt, Artificial Sequence
  Synthetic
auguguugauguuaaagguu

SEQ ID NO: 824235 - RNA, 20 nt, Artificial Sequence
  Synthetic
auuauuuuguguuaaagguu

SEQ ID NO: 824236 - RNA, 20 nt, Artificial Sequence
  Synthetic
uauucacaauagccaagguu

SEQ ID NO: 824237 - RNA, 20 nt, Artificial Sequence
  Synthetic
auccccaaaagagcaagguu

SEQ ID NO: 824238 - RNA, 20 nt, Artificial Sequence
  Synthetic
acugauaaaaagggaagguu

SEQ ID NO: 824239 - RNA, 20 nt, Artificial Sequence
  Synthetic
caggugggucacauaagguu

SEQ ID NO: 824240 - RNA, 20 nt, Artificial Sequence
  Synthetic
aacugcaggaggauaagguu

SEQ ID NO: 824241 - RNA, 20 nt, Artificial Sequence
  Synthetic
aauacacagcagcacagguu

SEQ ID NO: 824242 - RNA, 20 nt, Artificial Sequence
  Synthetic
uaaggcuaagaauacagguu

SEQ ID NO: 824243 - RNA, 20 nt, Artificial Sequence
  Synthetic
uccucuguuagguacagguu

SEQ ID NO: 824244 - RNA, 20 nt, Artificial Sequence
  Synthetic
cuaaguagguguuacagguu

SEQ ID NO: 824245 - RNA, 20 nt, Artificial Sequence
  Synthetic
cuccagcaggcagccagguu

SEQ ID NO: 824246 - RNA, 20 nt, Artificial Sequence
  Synthetic
auacaaaaauuugccagguu

SEQ ID NO: 824247 - RNA, 20 nt, Artificial Sequence
  Synthetic
cucaggugaacaagcagguu

SEQ ID NO: 824248 - RNA, 20 nt, Artificial Sequence
  Synthetic
ccaugaaggacuggcagguu

SEQ ID NO: 824249 - RNA, 20 nt, Artificial Sequence
  Synthetic
auuuccaaauuagucagguu

SEQ ID NO: 824250 - RNA, 20 nt, Artificial Sequence
  Synthetic
uaaaaaacauuugucagguu

SEQ ID NO: 824251 - RNA, 20 nt, Artificial Sequence
  Synthetic
cucucaaaaguguucagguu

SEQ ID NO: 824252 - RNA, 20 nt, Artificial Sequence
  Synthetic
uuucuuuaaaguuucagguu

SEQ ID NO: 824253 - RNA, 20 nt, Artificial Sequence
  Synthetic
ugaagucacagaaagagguu

SEQ ID NO: 824254 - RNA, 20 nt, Artificial Sequence
  Synthetic
auccauuaagagaagagguu

SEQ ID NO: 824255 - RNA, 20 nt, Artificial Sequence
  Synthetic
aauuuggcauugaagagguu

SEQ ID NO: 824256 - RNA, 20 nt, Artificial Sequence
  Synthetic
caggcuggauguaagagguu

SEQ ID NO: 824257 - RNA, 20 nt, Artificial Sequence
  Synthetic
ugaccuggauaucagagguu

SEQ ID NO: 824258 - RNA, 20 nt, Artificial Sequence
  Synthetic
uauuacaugaugccgagguu

SEQ ID NO: 824259 - RNA, 20 nt, Artificial Sequence
  Synthetic
ugcugcuuagaaaggagguu

SEQ ID NO: 824260 - RNA, 20 nt, Artificial Sequence
  Synthetic
ugaguauagaaagggagguu

SEQ ID NO: 824261 - RNA, 20 nt, Artificial Sequence
  Synthetic
cugucgaggggugggagguu

SEQ ID NO: 824262 - RNA, 20 nt, Artificial Sequence
  Synthetic
acuuagauggacuggagguu

SEQ ID NO: 824263 - RNA, 20 nt, Artificial Sequence
  Synthetic
ccuaucagaggguggagguu

SEQ ID NO: 824264 - RNA, 20 nt, Artificial Sequence
  Synthetic
uauugggugauacugagguu

SEQ ID NO: 824265 - RNA, 20 nt, Artificial Sequence
  Synthetic
cggguggaucaccugagguu

SEQ ID NO: 824266 - RNA, 20 nt, Artificial Sequence
  Synthetic
cuacuugggaggcugagguu

SEQ ID NO: 824267 - RNA, 20 nt, Artificial Sequence
  Synthetic
uagcgcaugaugcugagguu

SEQ ID NO: 824268 - RNA, 20 nt, Artificial Sequence
  Synthetic
uauugcaugaugcugagguu

SEQ ID NO: 824269 - RNA, 20 nt, Artificial Sequence
  Synthetic
uauggcgugaugcugagguu

SEQ ID NO: 824270 - RNA, 20 nt, Artificial Sequence
  Synthetic
uacugcgugaugcugagguu

SEQ ID NO: 824271 - RNA, 20 nt, Artificial Sequence
  Synthetic
caaaugauggcucugagguu

SEQ ID NO: 824272 - RNA, 20 nt, Artificial Sequence
  Synthetic
aagccuuaaguucugagguu

SEQ ID NO: 824273 - RNA, 20 nt, Artificial Sequence
  Synthetic
uccauuuguaaagugagguu

SEQ ID NO: 824274 - RNA, 20 nt, Artificial Sequence
  Synthetic
augucaguuguggugagguu

SEQ ID NO: 824275 - RNA, 20 nt, Artificial Sequence
  Synthetic
ugaaccucuuacuugagguu

SEQ ID NO: 824276 - RNA, 20 nt, Artificial Sequence
  Synthetic
aaaaaaacauuaaauagguu

SEQ ID NO: 824277 - RNA, 20 nt, Artificial Sequence
  Synthetic
agacacugauucaauagguu

SEQ ID NO: 824278 - RNA, 20 nt, Artificial Sequence
  Synthetic
uuggccugucuugcuagguu

SEQ ID NO: 824279 - RNA, 20 nt, Artificial Sequence
  Synthetic
uugaaaacaaucaguagguu

SEQ ID NO: 824280 - RNA, 20 nt, Artificial Sequence
  Synthetic
agacacugauucaguagguu

SEQ ID NO: 824281 - RNA, 20 nt, Artificial Sequence
  Synthetic
acaccaaucaaauguagguu

SEQ ID NO: 824282 - RNA, 20 nt, Artificial Sequence
  Synthetic
uccaggugguaauguagguu

SEQ ID NO: 824283 - RNA, 20 nt, Artificial Sequence
  Synthetic
uaagucccuuuguguagguu

SEQ ID NO: 824284 - RNA, 20 nt, Artificial Sequence
  Synthetic
uuauacaaaaaaauuagguu

SEQ ID NO: 824285 - RNA, 20 nt, Artificial Sequence
  Synthetic
uugguuuaaaaaauuagguu

SEQ ID NO: 824286 - RNA, 20 nt, Artificial Sequence
  Synthetic
ugaaacauuccaguuagguu

SEQ ID NO: 824287 - RNA, 20 nt, Artificial Sequence
  Synthetic
uucuuuuaucacuuuagguu

SEQ ID NO: 824288 - RNA, 20 nt, Artificial Sequence
  Synthetic
acugauguagagaaacgguu

SEQ ID NO: 824289 - RNA, 20 nt, Artificial Sequence
  Synthetic
uuugcaucacugauacgguu

SEQ ID NO: 824290 - RNA, 20 nt, Artificial Sequence
  Synthetic
aaggugcaggagauccgguu

SEQ ID NO: 824291 - RNA, 20 nt, Artificial Sequence
  Synthetic
uacugaguuuugaggcgguu

SEQ ID NO: 824292 - RNA, 20 nt, Artificial Sequence
  Synthetic
aauugaggcggccaaggguu

SEQ ID NO: 824293 - RNA, 20 nt, Artificial Sequence
  Synthetic
aaaucagagaagcaaggguu

SEQ ID NO: 824294 - RNA, 20 nt, Artificial Sequence
  Synthetic
caagucuuagugcaaggguu

SEQ ID NO: 824295 - RNA, 20 nt, Artificial Sequence
  Synthetic
uguguaucaagcuaaggguu

SEQ ID NO: 824296 - RNA, 20 nt, Artificial Sequence
  Synthetic
cuauuaaucuucccaggguu

SEQ ID NO: 824297 - RNA, 20 nt, Artificial Sequence
  Synthetic
uauuguaaguuggcaggguu

SEQ ID NO: 824298 - RNA, 20 nt, Artificial Sequence
  Synthetic
ccuauauuugacucaggguu

SEQ ID NO: 824299 - RNA, 20 nt, Artificial Sequence
  Synthetic
uuuuaaugguucucaggguu

SEQ ID NO: 824300 - RNA, 20 nt, Artificial Sequence
  Synthetic
cucaggccagcgggaggguu

SEQ ID NO: 824301 - RNA, 20 nt, Artificial Sequence
  Synthetic
acaguuugaagcugaggguu

SEQ ID NO: 824302 - RNA, 20 nt, Artificial Sequence
  Synthetic
ccucaaacaaugugaggguu

SEQ ID NO: 824303 - RNA, 20 nt, Artificial Sequence
  Synthetic
ccucaaacagugugaggguu

SEQ ID NO: 824304 - RNA, 20 nt, Artificial Sequence
  Synthetic
uacuugggaaguugaggguu

SEQ ID NO: 824305 - RNA, 20 nt, Artificial Sequence
  Synthetic
ucuuauagccucauaggguu

SEQ ID NO: 824306 - RNA, 20 nt, Artificial Sequence
  Synthetic
uuaaaggcagugauaggguu

SEQ ID NO: 824307 - RNA, 20 nt, Artificial Sequence
  Synthetic
uguucccaugcacuaggguu

SEQ ID NO: 824308 - RNA, 20 nt, Artificial Sequence
  Synthetic
cuauaaaacugccuaggguu

SEQ ID NO: 824309 - RNA, 20 nt, Artificial Sequence
  Synthetic
agcugcaguuugguaggguu

SEQ ID NO: 824310 - RNA, 20 nt, Artificial Sequence
  Synthetic
auacaaaaauuagccggguu

SEQ ID NO: 824311 - RNA, 20 nt, Artificial Sequence
  Synthetic
auucugagguaccagggguu

SEQ ID NO: 824312 - RNA, 20 nt, Artificial Sequence
  Synthetic
aaaaauccaagugagggguu

SEQ ID NO: 824313 - RNA, 20 nt, Artificial Sequence
  Synthetic
aaccccuaagacuagggguu

SEQ ID NO: 824314 - RNA, 20 nt, Artificial Sequence
  Synthetic
aaggaaagcggguagggguu

SEQ ID NO: 824315 - RNA, 20 nt, Artificial Sequence
  Synthetic
aacugcauuuugcggggguu

SEQ ID NO: 824316 - RNA, 20 nt, Artificial Sequence
  Synthetic
cucucaggggaugggggguu

SEQ ID NO: 824317 - RNA, 20 nt, Artificial Sequence
  Synthetic
uuuuguuuguuugggggguu

SEQ ID NO: 824318 - RNA, 20 nt, Artificial Sequence
  Synthetic
uucaaaaaguacaugggguu

SEQ ID NO: 824319 - RNA, 20 nt, Artificial Sequence
  Synthetic
uuuucaguagagaugggguu

SEQ ID NO: 824320 - RNA, 20 nt, Artificial Sequence
  Synthetic
uccccccauuggcugggguu

SEQ ID NO: 824321 - RNA, 20 nt, Artificial Sequence
  Synthetic
uuucugacuauucugggguu

SEQ ID NO: 824322 - RNA, 20 nt, Artificial Sequence
  Synthetic
auaucucugggagugggguu

SEQ ID NO: 824323 - RNA, 20 nt, Artificial Sequence
  Synthetic
ccgcacacaguggugggguu

SEQ ID NO: 824324 - RNA, 20 nt, Artificial Sequence
  Synthetic
aucuggucccaugugggguu

SEQ ID NO: 824325 - RNA, 20 nt, Artificial Sequence
  Synthetic
aacucaggagaugugggguu

SEQ ID NO: 824326 - RNA, 20 nt, Artificial Sequence
  Synthetic
aaauguaugugugugggguu

SEQ ID NO: 824327 - RNA, 20 nt, Artificial Sequence
  Synthetic
aaaaagaaagaauugggguu

SEQ ID NO: 824328 - RNA, 20 nt, Artificial Sequence
  Synthetic
ugaagcacugaguugggguu

SEQ ID NO: 824329 - RNA, 20 nt, Artificial Sequence
  Synthetic
caauuuugaauuuugggguu

SEQ ID NO: 824330 - RNA, 20 nt, Artificial Sequence
  Synthetic
agcaaaauacuacauggguu

SEQ ID NO: 824331 - RNA, 20 nt, Artificial Sequence
  Synthetic
uacauaaaacagcauggguu

SEQ ID NO: 824332 - RNA, 20 nt, Artificial Sequence
  Synthetic
uuauaacuaucucauggguu

SEQ ID NO: 824333 - RNA, 20 nt, Artificial Sequence
  Synthetic
uguuguaucuucuauggguu

SEQ ID NO: 824334 - RNA, 20 nt, Artificial Sequence
  Synthetic
ccagucucuuuuuauggguu

SEQ ID NO: 824335 - RNA, 20 nt, Artificial Sequence
  Synthetic
cugugaccuauaccuggguu

SEQ ID NO: 824336 - RNA, 20 nt, Artificial Sequence
  Synthetic
ugaaaguauucaaguggguu

SEQ ID NO: 824337 - RNA, 20 nt, Artificial Sequence
  Synthetic
ugggagcucuucaguggguu

SEQ ID NO: 824338 - RNA, 20 nt, Artificial Sequence
  Synthetic
uccacccucacgaguggguu

SEQ ID NO: 824339 - RNA, 20 nt, Artificial Sequence
  Synthetic
cacugauagaaauguggguu

SEQ ID NO: 824340 - RNA, 20 nt, Artificial Sequence
  Synthetic
uggaaauucuucuguggguu

SEQ ID NO: 824341 - RNA, 20 nt, Artificial Sequence
  Synthetic
aauagguuaggcauuggguu

SEQ ID NO: 824342 - RNA, 20 nt, Artificial Sequence
  Synthetic
caaugucaguuuauuggguu

SEQ ID NO: 824343 - RNA, 20 nt, Artificial Sequence
  Synthetic
aguuugauuguauuuggguu

SEQ ID NO: 824344 - RNA, 20 nt, Artificial Sequence
  Synthetic
caaucucuucuuaaaugguu

SEQ ID NO: 824345 - RNA, 20 nt, Artificial Sequence
  Synthetic
uguuuugauuuacaaugguu

SEQ ID NO: 824346 - RNA, 20 nt, Artificial Sequence
  Synthetic
aagugaugguaagaaugguu

SEQ ID NO: 824347 - RNA, 20 nt, Artificial Sequence
  Synthetic
caaaaguaauugacaugguu

SEQ ID NO: 824348 - RNA, 20 nt, Artificial Sequence
  Synthetic
uuuccaauuacugcaugguu

SEQ ID NO: 824349 - RNA, 20 nt, Artificial Sequence
  Synthetic
caucuacccugaagaugguu

SEQ ID NO: 824350 - RNA, 20 nt, Artificial Sequence
  Synthetic
aaaaagaauuugagaugguu

SEQ ID NO: 824351 - RNA, 20 nt, Artificial Sequence
  Synthetic
cacuguaucuguagaugguu

SEQ ID NO: 824352 - RNA, 20 nt, Artificial Sequence
  Synthetic
cucucagcccugggaugguu

SEQ ID NO: 824353 - RNA, 20 nt, Artificial Sequence
  Synthetic
auguuuaaauaaugaugguu

SEQ ID NO: 824354 - RNA, 20 nt, Artificial Sequence
  Synthetic
augaauaacuugugaugguu

SEQ ID NO: 824355 - RNA, 20 nt, Artificial Sequence
  Synthetic
agggaugaaaugauaugguu

SEQ ID NO: 824356 - RNA, 20 nt, Artificial Sequence
  Synthetic
cuuugaccaaugauaugguu

SEQ ID NO: 824357 - RNA, 20 nt, Artificial Sequence
  Synthetic
ccaaauaggaugauaugguu

SEQ ID NO: 824358 - RNA, 20 nt, Artificial Sequence
  Synthetic
cgaaacucuaugauaugguu

SEQ ID NO: 824359 - RNA, 20 nt, Artificial Sequence
  Synthetic
cuucaauaacugauaugguu

SEQ ID NO: 824360 - RNA, 20 nt, Artificial Sequence
  Synthetic
cuuuccauugugauaugguu

SEQ ID NO: 824361 - RNA, 20 nt, Artificial Sequence
  Synthetic
acacacacauugauaugguu

SEQ ID NO: 824362 - RNA, 20 nt, Artificial Sequence
  Synthetic
auuugauggauccuaugguu

SEQ ID NO: 824363 - RNA, 20 nt, Artificial Sequence
  Synthetic
cauguaggggagguaugguu

SEQ ID NO: 824364 - RNA, 20 nt, Artificial Sequence
  Synthetic
aggcucugauuuaacugguu

SEQ ID NO: 824365 - RNA, 20 nt, Artificial Sequence
  Synthetic
agaaauaucuuagacugguu

SEQ ID NO: 824366 - RNA, 20 nt, Artificial Sequence
  Synthetic
aauaauaaguaguacugguu

SEQ ID NO: 824367 - RNA, 20 nt, Artificial Sequence
  Synthetic
ugagaaauacagaccugguu

SEQ ID NO: 824368 - RNA, 20 nt, Artificial Sequence
  Synthetic
aaauuguacagcugcugguu

SEQ ID NO: 824369 - RNA, 20 nt, Artificial Sequence
  Synthetic
cugcauuuucugaucugguu

SEQ ID NO: 824370 - RNA, 20 nt, Artificial Sequence
  Synthetic
agauugcacauucucugguu

SEQ ID NO: 824371 - RNA, 20 nt, Artificial Sequence
  Synthetic
ugugauaucuuugucugguu

SEQ ID NO: 824372 - RNA, 20 nt, Artificial Sequence
  Synthetic
acaaaaagcuauuucugguu

SEQ ID NO: 824373 - RNA, 20 nt, Artificial Sequence
  Synthetic
agauuuuguucuuucugguu

SEQ ID NO: 824374 - RNA, 20 nt, Artificial Sequence
  Synthetic
augguuucugagcagugguu

SEQ ID NO: 824375 - RNA, 20 nt, Artificial Sequence
  Synthetic
agaucauucugguagugguu

SEQ ID NO: 824376 - RNA, 20 nt, Artificial Sequence
  Synthetic
aacauuucaugcucgugguu

SEQ ID NO: 824377 - RNA, 20 nt, Artificial Sequence
  Synthetic
ugacauaugaaguggugguu

SEQ ID NO: 824378 - RNA, 20 nt, Artificial Sequence
  Synthetic
aucuguauaugguggugguu

SEQ ID NO: 824379 - RNA, 20 nt, Artificial Sequence
  Synthetic
uuauaacaguguuggugguu

SEQ ID NO: 824380 - RNA, 20 nt, Artificial Sequence
  Synthetic
ucuucugcuggccugugguu

SEQ ID NO: 824381 - RNA, 20 nt, Artificial Sequence
  Synthetic
uuuaauuuuugccugugguu

SEQ ID NO: 824382 - RNA, 20 nt, Artificial Sequence
  Synthetic
agaauugcugcuaauugguu

SEQ ID NO: 824383 - RNA, 20 nt, Artificial Sequence
  Synthetic
aucugugauucagauugguu

SEQ ID NO: 824384 - RNA, 20 nt, Artificial Sequence
  Synthetic
aaaguuuuagcugauugguu

SEQ ID NO: 824385 - RNA, 20 nt, Artificial Sequence
  Synthetic
ccuaaucagacuuauugguu

SEQ ID NO: 824386 - RNA, 20 nt, Artificial Sequence
  Synthetic
agucaauauauaccuugguu

SEQ ID NO: 824387 - RNA, 20 nt, Artificial Sequence
  Synthetic
agaaaugauuaagcuugguu

SEQ ID NO: 824388 - RNA, 20 nt, Artificial Sequence
  Synthetic
caagucccuucaucuugguu

SEQ ID NO: 824389 - RNA, 20 nt, Artificial Sequence
  Synthetic
uugucuuaaaugucuugguu

SEQ ID NO: 824390 - RNA, 20 nt, Artificial Sequence
  Synthetic
caucuuuuaccuucuugguu

SEQ ID NO: 824391 - RNA, 20 nt, Artificial Sequence
  Synthetic
ucaaaugguccuucuugguu

SEQ ID NO: 824392 - RNA, 20 nt, Artificial Sequence
  Synthetic
aaacaaaauuauaguugguu

SEQ ID NO: 824393 - RNA, 20 nt, Artificial Sequence
  Synthetic
uuaaaauauauuuguugguu

SEQ ID NO: 824394 - RNA, 20 nt, Artificial Sequence
  Synthetic
agaauuucagaaauuugguu

SEQ ID NO: 824395 - RNA, 20 nt, Artificial Sequence
  Synthetic
uaaaaugaggucauuugguu

SEQ ID NO: 824396 - RNA, 20 nt, Artificial Sequence
  Synthetic
ugguugaaagcuauuugguu

SEQ ID NO: 824397 - RNA, 20 nt, Artificial Sequence
  Synthetic
aguguuuucucuauuugguu

SEQ ID NO: 824398 - RNA, 20 nt, Artificial Sequence
  Synthetic
uuugcauaacaaaaaauguu

SEQ ID NO: 824399 - RNA, 20 nt, Artificial Sequence
  Synthetic
uaaaaccaucaaaaaauguu

SEQ ID NO: 824400 - RNA, 20 nt, Artificial Sequence
  Synthetic
uuucuuauauuaaaaauguu

SEQ ID NO: 824401 - RNA, 20 nt, Artificial Sequence
  Synthetic
ucuaacuucuagaaaauguu

SEQ ID NO: 824402 - RNA, 20 nt, Artificial Sequence
  Synthetic
uaugcaauuuagaaaauguu

SEQ ID NO: 824403 - RNA, 20 nt, Artificial Sequence
  Synthetic
uaaauggagauuaaaauguu

SEQ ID NO: 824404 - RNA, 20 nt, Artificial Sequence
  Synthetic
ugaauaguuuaccaaauguu

SEQ ID NO: 824405 - RNA, 20 nt, Artificial Sequence
  Synthetic
uaagaugaaugggaaauguu

SEQ ID NO: 824406 - RNA, 20 nt, Artificial Sequence
  Synthetic
aaaauaauaaaauaaauguu

SEQ ID NO: 824407 - RNA, 20 nt, Artificial Sequence
  Synthetic
augaguuggagcuaaauguu

SEQ ID NO: 824408 - RNA, 20 nt, Artificial Sequence
  Synthetic
uaaucagcuaaguaaauguu

SEQ ID NO: 824409 - RNA, 20 nt, Artificial Sequence
  Synthetic
ccaaacuaaccuuaaauguu

SEQ ID NO: 824410 - RNA, 20 nt, Artificial Sequence
  Synthetic
acaugcuagcuuuaaauguu

SEQ ID NO: 824411 - RNA, 20 nt, Artificial Sequence
  Synthetic
cuugcuccuagcacaauguu

SEQ ID NO: 824412 - RNA, 20 nt, Artificial Sequence
  Synthetic
uaaaguagauguacaauguu

SEQ ID NO: 824413 - RNA, 20 nt, Artificial Sequence
  Synthetic
uauuuagguacuccaauguu

SEQ ID NO: 824414 - RNA, 20 nt, Artificial Sequence
  Synthetic
uuauauuuaccaagaauguu

SEQ ID NO: 824415 - RNA, 20 nt, Artificial Sequence
  Synthetic
aaaggggugguuagaauguu

SEQ ID NO: 824416 - RNA, 20 nt, Artificial Sequence
  Synthetic
uuugaaauuucuggaauguu

SEQ ID NO: 824417 - RNA, 20 nt, Artificial Sequence
  Synthetic
cucucacuucaaugaauguu

SEQ ID NO: 824418 - RNA, 20 nt, Artificial Sequence
  Synthetic
agagguugaaauauaauguu

SEQ ID NO: 824419 - RNA, 20 nt, Artificial Sequence
  Synthetic
cuagugucuagccuaauguu

SEQ ID NO: 824420 - RNA, 20 nt, Artificial Sequence
  Synthetic
cuugaaaaguagguaauguu

SEQ ID NO: 824421 - RNA, 20 nt, Artificial Sequence
  Synthetic
uguuaacuaauguuaauguu

SEQ ID NO: 824422 - RNA, 20 nt, Artificial Sequence
  Synthetic
cuuugaagacauuuaauguu

SEQ ID NO: 824423 - RNA, 20 nt, Artificial Sequence
  Synthetic
uuauuauuaccuuuaauguu

SEQ ID NO: 824424 - RNA, 20 nt, Artificial Sequence
  Synthetic
agaugcaugucaaacauguu

SEQ ID NO: 824425 - RNA, 20 nt, Artificial Sequence
  Synthetic
uccacaucuaagcacauguu

SEQ ID NO: 824426 - RNA, 20 nt, Artificial Sequence
  Synthetic
cauauuccaggagacauguu

SEQ ID NO: 824427 - RNA, 20 nt, Artificial Sequence
  Synthetic
auuaguauuuaggacauguu

SEQ ID NO: 824428 - RNA, 20 nt, Artificial Sequence
  Synthetic
auuuacauauauuacauguu

SEQ ID NO: 824429 - RNA, 20 nt, Artificial Sequence
  Synthetic
ccuccagguccauccauguu

SEQ ID NO: 824430 - RNA, 20 nt, Artificial Sequence
  Synthetic
aauacuaggaacagcauguu

SEQ ID NO: 824431 - RNA, 20 nt, Artificial Sequence
  Synthetic
uuaaggugaaaaugcauguu

SEQ ID NO: 824432 - RNA, 20 nt, Artificial Sequence
  Synthetic
cuauagaauuuuugcauguu

SEQ ID NO: 824433 - RNA, 20 nt, Artificial Sequence
  Synthetic
uuauuuucacagaucauguu

SEQ ID NO: 824434 - RNA, 20 nt, Artificial Sequence
  Synthetic
uuuaaagauacuaucauguu

SEQ ID NO: 824435 - RNA, 20 nt, Artificial Sequence
  Synthetic
uuugucuuuccucucauguu

SEQ ID NO: 824436 - RNA, 20 nt, Artificial Sequence
  Synthetic
uguagugcuaacuucauguu

SEQ ID NO: 824437 - RNA, 20 nt, Artificial Sequence
  Synthetic
agcauuuaaaaccagauguu

SEQ ID NO: 824438 - RNA, 20 nt, Artificial Sequence
  Synthetic
uauccaaguuuccagauguu

SEQ ID NO: 824439 - RNA, 20 nt, Artificial Sequence
  Synthetic
uuuuaaacuugugagauguu

SEQ ID NO: 824440 - RNA, 20 nt, Artificial Sequence
  Synthetic
uugugcaguaaauagauguu

SEQ ID NO: 824441 - RNA, 20 nt, Artificial Sequence
  Synthetic
uaaguuauguaauagauguu

SEQ ID NO: 824442 - RNA, 20 nt, Artificial Sequence
  Synthetic
ccuguguuacucaggauguu

SEQ ID NO: 824443 - RNA, 20 nt, Artificial Sequence
  Synthetic
ccuguccacuauaggauguu

SEQ ID NO: 824444 - RNA, 20 nt, Artificial Sequence
  Synthetic
aaugggugaucuaggauguu

SEQ ID NO: 824445 - RNA, 20 nt, Artificial Sequence
  Synthetic
uuugggugaauagggauguu

SEQ ID NO: 824446 - RNA, 20 nt, Artificial Sequence
  Synthetic
acuggaagcagugggauguu

SEQ ID NO: 824447 - RNA, 20 nt, Artificial Sequence
  Synthetic
cuagacuaagcaaugauguu

SEQ ID NO: 824448 - RNA, 20 nt, Artificial Sequence
  Synthetic
aucaguuuaauaaugauguu

SEQ ID NO: 824449 - RNA, 20 nt, Artificial Sequence
  Synthetic
uuguuauuagagaugauguu

SEQ ID NO: 824450 - RNA, 20 nt, Artificial Sequence
  Synthetic
agcaucaccuauaugauguu

SEQ ID NO: 824451 - RNA, 20 nt, Artificial Sequence
  Synthetic
uucacuauguauaugauguu

SEQ ID NO: 824452 - RNA, 20 nt, Artificial Sequence
  Synthetic
agugggaucaggcugauguu

SEQ ID NO: 824453 - RNA, 20 nt, Artificial Sequence
  Synthetic
uaacuaauacuucugauguu

SEQ ID NO: 824454 - RNA, 20 nt, Artificial Sequence
  Synthetic
aaauuuauccuugugauguu

SEQ ID NO: 824455 - RNA, 20 nt, Artificial Sequence
  Synthetic
aaaugagaauuauugauguu

SEQ ID NO: 824456 - RNA, 20 nt, Artificial Sequence
  Synthetic
agggauucccaaaauauguu

SEQ ID NO: 824457 - RNA, 20 nt, Artificial Sequence
  Synthetic
aaauuauagagcaauauguu

SEQ ID NO: 824458 - RNA, 20 nt, Artificial Sequence
  Synthetic
auuugauucugcaauauguu

SEQ ID NO: 824459 - RNA, 20 nt, Artificial Sequence
  Synthetic
ucucagauucaccauauguu

SEQ ID NO: 824460 - RNA, 20 nt, Artificial Sequence
  Synthetic
ucugaagcuucccauauguu

SEQ ID NO: 824461 - RNA, 20 nt, Artificial Sequence
  Synthetic
uccaggauagaucauauguu

SEQ ID NO: 824462 - RNA, 20 nt, Artificial Sequence
  Synthetic
uucaggguagaucauauguu

SEQ ID NO: 824463 - RNA, 20 nt, Artificial Sequence
  Synthetic
ucuacuuagucagauauguu

SEQ ID NO: 824464 - RNA, 20 nt, Artificial Sequence
  Synthetic
auguuguugauagauauguu

SEQ ID NO: 824465 - RNA, 20 nt, Artificial Sequence
  Synthetic
uuaugauauuaggauauguu

SEQ ID NO: 824466 - RNA, 20 nt, Artificial Sequence
  Synthetic
caggagcaaaaugauauguu

SEQ ID NO: 824467 - RNA, 20 nt, Artificial Sequence
  Synthetic
caauuuucugauuauauguu

SEQ ID NO: 824468 - RNA, 20 nt, Artificial Sequence
  Synthetic
uuggaugucuauuauauguu

SEQ ID NO: 824469 - RNA, 20 nt, Artificial Sequence
  Synthetic
agacgggguuucacuauguu

SEQ ID NO: 824470 - RNA, 20 nt, Artificial Sequence
  Synthetic
uuuccuauggaagcuauguu

SEQ ID NO: 824471 - RNA, 20 nt, Artificial Sequence
  Synthetic
agagcuaguccagcuauguu

SEQ ID NO: 824472 - RNA, 20 nt, Artificial Sequence
  Synthetic
cugucucucuuugcuauguu

SEQ ID NO: 824473 - RNA, 20 nt, Artificial Sequence
  Synthetic
uggcucagagaaucuauguu

SEQ ID NO: 824474 - RNA, 20 nt, Artificial Sequence
  Synthetic
uugaggaaaagaucuauguu

SEQ ID NO: 824475 - RNA, 20 nt, Artificial Sequence
  Synthetic
uauuuuaucaucaguauguu

SEQ ID NO: 824476 - RNA, 20 nt, Artificial Sequence
  Synthetic
uugcuguauccucguauguu

SEQ ID NO: 824477 - RNA, 20 nt, Artificial Sequence
  Synthetic
ugacauugaaaagguauguu

SEQ ID NO: 824478 - RNA, 20 nt, Artificial Sequence
  Synthetic
agauaaauauuagguauguu

SEQ ID NO: 824479 - RNA, 20 nt, Artificial Sequence
  Synthetic
uuaauauaugaaauuauguu

SEQ ID NO: 824480 - RNA, 20 nt, Artificial Sequence
  Synthetic
uuuagaauguuaauuauguu

SEQ ID NO: 824481 - RNA, 20 nt, Artificial Sequence
  Synthetic
augugacagcagauuauguu

SEQ ID NO: 824482 - RNA, 20 nt, Artificial Sequence
  Synthetic
cccaagacuuagauuauguu

SEQ ID NO: 824483 - RNA, 20 nt, Artificial Sequence
  Synthetic
aggaagguuuuaguuauguu

SEQ ID NO: 824484 - RNA, 20 nt, Artificial Sequence
  Synthetic
uauuugugcccuguuauguu

SEQ ID NO: 824485 - RNA, 20 nt, Artificial Sequence
  Synthetic
uuugaaaacuccuuuauguu

SEQ ID NO: 824486 - RNA, 20 nt, Artificial Sequence
  Synthetic
ugggggucuggguuuauguu

SEQ ID NO: 824487 - RNA, 20 nt, Artificial Sequence
  Synthetic
aaaaguuauccuuuuauguu

SEQ ID NO: 824488 - RNA, 20 nt, Artificial Sequence
  Synthetic
uugaugccuauaaaacuguu

SEQ ID NO: 824489 - RNA, 20 nt, Artificial Sequence
  Synthetic
ugaauacaaacuaaacuguu

SEQ ID NO: 824490 - RNA, 20 nt, Artificial Sequence
  Synthetic
aaagaaauaccuuaacuguu

SEQ ID NO: 824491 - RNA, 20 nt, Artificial Sequence
  Synthetic
uuuuuguguuuuuaacuguu

SEQ ID NO: 824492 - RNA, 20 nt, Artificial Sequence
  Synthetic
aaaauguguuagacacuguu

SEQ ID NO: 824493 - RNA, 20 nt, Artificial Sequence
  Synthetic
uuuauaguuuuaucacuguu

SEQ ID NO: 824494 - RNA, 20 nt, Artificial Sequence
  Synthetic
uagguacuaugcucacuguu

SEQ ID NO: 824495 - RNA, 20 nt, Artificial Sequence
  Synthetic
auggaggagguuucacuguu

SEQ ID NO: 824496 - RNA, 20 nt, Artificial Sequence
  Synthetic
uaagacuuugagugacuguu

SEQ ID NO: 824497 - RNA, 20 nt, Artificial Sequence
  Synthetic
uaagacuuugggugacuguu

SEQ ID NO: 824498 - RNA, 20 nt, Artificial Sequence
  Synthetic
auguguauucugcuacuguu

SEQ ID NO: 824499 - RNA, 20 nt, Artificial Sequence
  Synthetic
ugcuucauaggauuacuguu

SEQ ID NO: 824500 - RNA, 20 nt, Artificial Sequence
  Synthetic
ucauuguggugccaccuguu

SEQ ID NO: 824501 - RNA, 20 nt, Artificial Sequence
  Synthetic
ucuaaauucauauaccuguu

SEQ ID NO: 824502 - RNA, 20 nt, Artificial Sequence
  Synthetic
acuaucaucucaccccuguu

SEQ ID NO: 824503 - RNA, 20 nt, Artificial Sequence
  Synthetic
aaaggcagauguccccuguu

SEQ ID NO: 824504 - RNA, 20 nt, Artificial Sequence
  Synthetic
uuucauuacuucucccuguu

SEQ ID NO: 824505 - RNA, 20 nt, Artificial Sequence
  Synthetic
aaagucagugguagccuguu

SEQ ID NO: 824506 - RNA, 20 nt, Artificial Sequence
  Synthetic
cuuaaagaaagaugccuguu

SEQ ID NO: 824507 - RNA, 20 nt, Artificial Sequence
  Synthetic
aacacacacuggugccuguu

SEQ ID NO: 824508 - RNA, 20 nt, Artificial Sequence
  Synthetic
cagguggggccuguccuguu

SEQ ID NO: 824509 - RNA, 20 nt, Artificial Sequence
  Synthetic
uuuaaaaauauuuuccuguu

SEQ ID NO: 824510 - RNA, 20 nt, Artificial Sequence
  Synthetic
cacaaaauugggcagcuguu

SEQ ID NO: 824511 - RNA, 20 nt, Artificial Sequence
  Synthetic
ucuugcugcugcucgcuguu

SEQ ID NO: 824512 - RNA, 20 nt, Artificial Sequence
  Synthetic
uauaucauacauaggcuguu

SEQ ID NO: 824513 - RNA, 20 nt, Artificial Sequence
  Synthetic
aacuaauauacugggcuguu

SEQ ID NO: 824514 - RNA, 20 nt, Artificial Sequence
  Synthetic
aauacugaacccuggcuguu

SEQ ID NO: 824515 - RNA, 20 nt, Artificial Sequence
  Synthetic
aacuggggcucaaugcuguu

SEQ ID NO: 824516 - RNA, 20 nt, Artificial Sequence
  Synthetic
auugugugggugaugcuguu

SEQ ID NO: 824517 - RNA, 20 nt, Artificial Sequence
  Synthetic
cagugagaacauaugcuguu

SEQ ID NO: 824518 - RNA, 20 nt, Artificial Sequence
  Synthetic
cuuuguucuagacugcuguu

SEQ ID NO: 824519 - RNA, 20 nt, Artificial Sequence
  Synthetic
uuaauuugaggacugcuguu

SEQ ID NO: 824520 - RNA, 20 nt, Artificial Sequence
  Synthetic
aaagucuaugaccugcuguu

SEQ ID NO: 824521 - RNA, 20 nt, Artificial Sequence
  Synthetic
cccagcuggugccugcuguu

SEQ ID NO: 824522 - RNA, 20 nt, Artificial Sequence
  Synthetic
aguuuucacugagugcuguu

SEQ ID NO: 824523 - RNA, 20 nt, Artificial Sequence
  Synthetic
uuugauaccaaaaaucuguu

SEQ ID NO: 824524 - RNA, 20 nt, Artificial Sequence
  Synthetic
aacuuuaucaaaaaucuguu

SEQ ID NO: 824525 - RNA, 20 nt, Artificial Sequence
  Synthetic
ccaaucuugaguaaucuguu

SEQ ID NO: 824526 - RNA, 20 nt, Artificial Sequence
  Synthetic
aauuaauguuguaaucuguu

SEQ ID NO: 824527 - RNA, 20 nt, Artificial Sequence
  Synthetic
ugaaacauacugcaucuguu

SEQ ID NO: 824528 - RNA, 20 nt, Artificial Sequence
  Synthetic
aaauugacuugucaucuguu

SEQ ID NO: 824529 - RNA, 20 nt, Artificial Sequence
  Synthetic
cagggauguuguuaucuguu

SEQ ID NO: 824530 - RNA, 20 nt, Artificial Sequence
  Synthetic
uugccucacuguccucuguu

SEQ ID NO: 824531 - RNA, 20 nt, Artificial Sequence
  Synthetic
uuaguuaacaauucucuguu

SEQ ID NO: 824532 - RNA, 20 nt, Artificial Sequence
  Synthetic
ugcugggugccuucucuguu

SEQ ID NO: 824533 - RNA, 20 nt, Artificial Sequence
  Synthetic
uuuugccuaguuucucuguu

SEQ ID NO: 824534 - RNA, 20 nt, Artificial Sequence
  Synthetic
uauauuaaaauaagucuguu

SEQ ID NO: 824535 - RNA, 20 nt, Artificial Sequence
  Synthetic
auguucuguauaugucuguu

SEQ ID NO: 824536 - RNA, 20 nt, Artificial Sequence
  Synthetic
uguuauguucauugucuguu

SEQ ID NO: 824537 - RNA, 20 nt, Artificial Sequence
  Synthetic
auucacaucaaacuucuguu

SEQ ID NO: 824538 - RNA, 20 nt, Artificial Sequence
  Synthetic
caaucugcuagucuucuguu

SEQ ID NO: 824539 - RNA, 20 nt, Artificial Sequence
  Synthetic
ucuaggccgucgguucuguu

SEQ ID NO: 824540 - RNA, 20 nt, Artificial Sequence
  Synthetic
agaauucauccauuucuguu

SEQ ID NO: 824541 - RNA, 20 nt, Artificial Sequence
  Synthetic
uuaucagguuuauuucuguu

SEQ ID NO: 824542 - RNA, 20 nt, Artificial Sequence
  Synthetic
augcccuaugguuuucuguu

SEQ ID NO: 824543 - RNA, 20 nt, Artificial Sequence
  Synthetic
ccucggccccccaaaguguu

SEQ ID NO: 824544 - RNA, 20 nt, Artificial Sequence
  Synthetic
acucagccucccaaaguguu

SEQ ID NO: 824545 - RNA, 20 nt, Artificial Sequence
  Synthetic
ccucagccucccaaaguguu

SEQ ID NO: 824546 - RNA, 20 nt, Artificial Sequence
  Synthetic
cuucggccucccaaaguguu

SEQ ID NO: 824547 - RNA, 20 nt, Artificial Sequence
  Synthetic
ccuuggccucccaaaguguu

SEQ ID NO: 824548 - RNA, 20 nt, Artificial Sequence
  Synthetic
aaccguauuugugaaguguu

SEQ ID NO: 824549 - RNA, 20 nt, Artificial Sequence
  Synthetic
uuauuuaaacauacaguguu

SEQ ID NO: 824550 - RNA, 20 nt, Artificial Sequence
  Synthetic
aagcuaggagcaccaguguu

SEQ ID NO: 824551 - RNA, 20 nt, Artificial Sequence
  Synthetic
caccacagccccccaguguu

SEQ ID NO: 824552 - RNA, 20 nt, Artificial Sequence
  Synthetic
cagugagaacaugcaguguu

SEQ ID NO: 824553 - RNA, 20 nt, Artificial Sequence
  Synthetic
accacugaauaaucaguguu

SEQ ID NO: 824554 - RNA, 20 nt, Artificial Sequence
  Synthetic
ccagaaccuagaucaguguu

SEQ ID NO: 824555 - RNA, 20 nt, Artificial Sequence
  Synthetic
ccauggaacuucugaguguu

SEQ ID NO: 824556 - RNA, 20 nt, Artificial Sequence
  Synthetic
auaccaucaccuugaguguu

SEQ ID NO: 824557 - RNA, 20 nt, Artificial Sequence
  Synthetic
aguaggugaucaauaguguu

SEQ ID NO: 824558 - RNA, 20 nt, Artificial Sequence
  Synthetic
uuagugcacaaacuaguguu

SEQ ID NO: 824559 - RNA, 20 nt, Artificial Sequence
  Synthetic
agucauauucugaacguguu

SEQ ID NO: 824560 - RNA, 20 nt, Artificial Sequence
  Synthetic
uagcauaauuucagcguguu

SEQ ID NO: 824561 - RNA, 20 nt, Artificial Sequence
  Synthetic
uaucaacauuacaagguguu

SEQ ID NO: 824562 - RNA, 20 nt, Artificial Sequence
  Synthetic
aacuaauuauaugagguguu

SEQ ID NO: 824563 - RNA, 20 nt, Artificial Sequence
  Synthetic
uccauucccagcccgguguu

SEQ ID NO: 824564 - RNA, 20 nt, Artificial Sequence
  Synthetic
cuuaacaaugcuuggguguu

SEQ ID NO: 824565 - RNA, 20 nt, Artificial Sequence
  Synthetic
ccuauuuaauaaaugguguu

SEQ ID NO: 824566 - RNA, 20 nt, Artificial Sequence
  Synthetic
aaaauuuauuucaugguguu

SEQ ID NO: 824567 - RNA, 20 nt, Artificial Sequence
  Synthetic
aauuuuuuaaaagugguguu

SEQ ID NO: 824568 - RNA, 20 nt, Artificial Sequence
  Synthetic
cuaguucucacagugguguu

SEQ ID NO: 824569 - RNA, 20 nt, Artificial Sequence
  Synthetic
acuuuaauuugagugguguu

SEQ ID NO: 824570 - RNA, 20 nt, Artificial Sequence
  Synthetic
cugccaugugucgugguguu

SEQ ID NO: 824571 - RNA, 20 nt, Artificial Sequence
  Synthetic
aguggcuuacaugugguguu

SEQ ID NO: 824572 - RNA, 20 nt, Artificial Sequence
  Synthetic
uuccauacuaguuugguguu

SEQ ID NO: 824573 - RNA, 20 nt, Artificial Sequence
  Synthetic
uuuaugcucacaaauguguu

SEQ ID NO: 824574 - RNA, 20 nt, Artificial Sequence
  Synthetic
aaacacacacacaauguguu

SEQ ID NO: 824575 - RNA, 20 nt, Artificial Sequence
  Synthetic
ucuuucuaauucaauguguu

SEQ ID NO: 824576 - RNA, 20 nt, Artificial Sequence
  Synthetic
cuuagauuuuucaauguguu

SEQ ID NO: 824577 - RNA, 20 nt, Artificial Sequence
  Synthetic
aucaauaaugguaauguguu

SEQ ID NO: 824578 - RNA, 20 nt, Artificial Sequence
  Synthetic
cagaaggucuuucauguguu

SEQ ID NO: 824579 - RNA, 20 nt, Artificial Sequence
  Synthetic
cagaaugcuuuugauguguu

SEQ ID NO: 824580 - RNA, 20 nt, Artificial Sequence
  Synthetic
uuuuaugccauauauguguu

SEQ ID NO: 824581 - RNA, 20 nt, Artificial Sequence
  Synthetic
caaauugauuacuauguguu

SEQ ID NO: 824582 - RNA, 20 nt, Artificial Sequence
  Synthetic
uuuagcacuuacuauguguu

SEQ ID NO: 824583 - RNA, 20 nt, Artificial Sequence
  Synthetic
cugacaggguagacuguguu

SEQ ID NO: 824584 - RNA, 20 nt, Artificial Sequence
  Synthetic
acaggaaaguugccuguguu

SEQ ID NO: 824585 - RNA, 20 nt, Artificial Sequence
  Synthetic
uaauuuguuacaucuguguu

SEQ ID NO: 824586 - RNA, 20 nt, Artificial Sequence
  Synthetic
cccaguggggacucuguguu

SEQ ID NO: 824587 - RNA, 20 nt, Artificial Sequence
  Synthetic
ugcauuugucuuucuguguu

SEQ ID NO: 824588 - RNA, 20 nt, Artificial Sequence
  Synthetic
aucuaccauuuuucuguguu

SEQ ID NO: 824589 - RNA, 20 nt, Artificial Sequence
  Synthetic
uaaagauuccucaguguguu

SEQ ID NO: 824590 - RNA, 20 nt, Artificial Sequence
  Synthetic
aaaaguaauauauguguguu

SEQ ID NO: 824591 - RNA, 20 nt, Artificial Sequence
  Synthetic
uguauguguauguguguguu

SEQ ID NO: 824592 - RNA, 20 nt, Artificial Sequence
  Synthetic
auuuuuguguugauuguguu

SEQ ID NO: 824593 - RNA, 20 nt, Artificial Sequence
  Synthetic
uuugcuuuuuaacuuguguu

SEQ ID NO: 824594 - RNA, 20 nt, Artificial Sequence
  Synthetic
auuggcuugguccuuguguu

SEQ ID NO: 824595 - RNA, 20 nt, Artificial Sequence
  Synthetic
aaaguuuacaaauuuguguu

SEQ ID NO: 824596 - RNA, 20 nt, Artificial Sequence
  Synthetic
auuggucauuuauuuguguu

SEQ ID NO: 824597 - RNA, 20 nt, Artificial Sequence
  Synthetic
auuuaccauugcuuuguguu

SEQ ID NO: 824598 - RNA, 20 nt, Artificial Sequence
  Synthetic
ucaguuucuguguuuguguu

SEQ ID NO: 824599 - RNA, 20 nt, Artificial Sequence
  Synthetic
uugagaaacaaaaaauuguu

SEQ ID NO: 824600 - RNA, 20 nt, Artificial Sequence
  Synthetic
cacagaucaauccaauuguu

SEQ ID NO: 824601 - RNA, 20 nt, Artificial Sequence
  Synthetic
aauuuuguuuuggaauuguu

SEQ ID NO: 824602 - RNA, 20 nt, Artificial Sequence
  Synthetic
auguauauucuauaauuguu

SEQ ID NO: 824603 - RNA, 20 nt, Artificial Sequence
  Synthetic
accucauccaacuaauuguu

SEQ ID NO: 824604 - RNA, 20 nt, Artificial Sequence
  Synthetic
cccuucuauaauuaauuguu

SEQ ID NO: 824605 - RNA, 20 nt, Artificial Sequence
  Synthetic
aaguaaaggucuuaauuguu

SEQ ID NO: 824606 - RNA, 20 nt, Artificial Sequence
  Synthetic
uagaugcuaccaacauuguu

SEQ ID NO: 824607 - RNA, 20 nt, Artificial Sequence
  Synthetic
uucuuuucuaucacauuguu

SEQ ID NO: 824608 - RNA, 20 nt, Artificial Sequence
  Synthetic
auuacaguuggcccauuguu

SEQ ID NO: 824609 - RNA, 20 nt, Artificial Sequence
  Synthetic
caauuuuuuuuugcauuguu

SEQ ID NO: 824610 - RNA, 20 nt, Artificial Sequence
  Synthetic
augauugagauaucauuguu

SEQ ID NO: 824611 - RNA, 20 nt, Artificial Sequence
  Synthetic
uuucauacauauucauuguu

SEQ ID NO: 824612 - RNA, 20 nt, Artificial Sequence
  Synthetic
agaaaaaaauuaagauuguu

SEQ ID NO: 824613 - RNA, 20 nt, Artificial Sequence
  Synthetic
acuggccucauaggauuguu

SEQ ID NO: 824614 - RNA, 20 nt, Artificial Sequence
  Synthetic
aagaguauaauuggauuguu

SEQ ID NO: 824615 - RNA, 20 nt, Artificial Sequence
  Synthetic
aaucucacaaacauauuguu

SEQ ID NO: 824616 - RNA, 20 nt, Artificial Sequence
  Synthetic
uugaugcuuuucauauuguu

SEQ ID NO: 824617 - RNA, 20 nt, Artificial Sequence
  Synthetic
cuauuaaugaauguauuguu

SEQ ID NO: 824618 - RNA, 20 nt, Artificial Sequence
  Synthetic
ugcuacagggucuuauuguu

SEQ ID NO: 824619 - RNA, 20 nt, Artificial Sequence
  Synthetic
uacaaggccugguuauuguu

SEQ ID NO: 824620 - RNA, 20 nt, Artificial Sequence
  Synthetic
ccuuuugauugguuauuguu

SEQ ID NO: 824621 - RNA, 20 nt, Artificial Sequence
  Synthetic
uguuuuuaugcuuuauuguu

SEQ ID NO: 824622 - RNA, 20 nt, Artificial Sequence
  Synthetic
uucuucucgaaaaacuuguu

SEQ ID NO: 824623 - RNA, 20 nt, Artificial Sequence
  Synthetic
agauacauuuaucacuuguu

SEQ ID NO: 824624 - RNA, 20 nt, Artificial Sequence
  Synthetic
caguuucuguuuuacuuguu

SEQ ID NO: 824625 - RNA, 20 nt, Artificial Sequence
  Synthetic
agaguccaguucaccuuguu

SEQ ID NO: 824626 - RNA, 20 nt, Artificial Sequence
  Synthetic
cacucccauuaacccuuguu

SEQ ID NO: 824627 - RNA, 20 nt, Artificial Sequence
  Synthetic
ccauuuuggacucccuuguu

SEQ ID NO: 824628 - RNA, 20 nt, Artificial Sequence
  Synthetic
uauaguacagaugccuuguu

SEQ ID NO: 824629 - RNA, 20 nt, Artificial Sequence
  Synthetic
cucucaaaaauauccuuguu

SEQ ID NO: 824630 - RNA, 20 nt, Artificial Sequence
  Synthetic
caauuagauaacagcuuguu

SEQ ID NO: 824631 - RNA, 20 nt, Artificial Sequence
  Synthetic
aggccaagauggaucuuguu

SEQ ID NO: 824632 - RNA, 20 nt, Artificial Sequence
  Synthetic
ugcucuguaccucucuuguu

SEQ ID NO: 824633 - RNA, 20 nt, Artificial Sequence
  Synthetic
ugaccuuuucaauucuuguu

SEQ ID NO: 824634 - RNA, 20 nt, Artificial Sequence
  Synthetic
aguaacuguacuuucuuguu

SEQ ID NO: 824635 - RNA, 20 nt, Artificial Sequence
  Synthetic
ugugccaucuguuucuuguu

SEQ ID NO: 824636 - RNA, 20 nt, Artificial Sequence
  Synthetic
uuucugcuuuuuaaguuguu

SEQ ID NO: 824637 - RNA, 20 nt, Artificial Sequence
  Synthetic
ccuucugaaacagaguuguu

SEQ ID NO: 824638 - RNA, 20 nt, Artificial Sequence
  Synthetic
uauuuggaagcucuguuguu

SEQ ID NO: 824639 - RNA, 20 nt, Artificial Sequence
  Synthetic
aucauuauucuucuguuguu

SEQ ID NO: 824640 - RNA, 20 nt, Artificial Sequence
  Synthetic
ucauaagugugaaauuuguu

SEQ ID NO: 824641 - RNA, 20 nt, Artificial Sequence
  Synthetic
ucaaucuuguuaaauuuguu

SEQ ID NO: 824642 - RNA, 20 nt, Artificial Sequence
  Synthetic
cuuccuacagccaauuuguu

SEQ ID NO: 824643 - RNA, 20 nt, Artificial Sequence
  Synthetic
uuauuugguaguaauuuguu

SEQ ID NO: 824644 - RNA, 20 nt, Artificial Sequence
  Synthetic
ucauuuggagguaauuuguu

SEQ ID NO: 824645 - RNA, 20 nt, Artificial Sequence
  Synthetic
ucuauggucucccauuuguu

SEQ ID NO: 824646 - RNA, 20 nt, Artificial Sequence
  Synthetic
ucaccugcuggagauuuguu

SEQ ID NO: 824647 - RNA, 20 nt, Artificial Sequence
  Synthetic
auugcaaaaaaggauuuguu

SEQ ID NO: 824648 - RNA, 20 nt, Artificial Sequence
  Synthetic
uacuuuugaacauauuuguu

SEQ ID NO: 824649 - RNA, 20 nt, Artificial Sequence
  Synthetic
agauuucuaaacuauuuguu

SEQ ID NO: 824650 - RNA, 20 nt, Artificial Sequence
  Synthetic
uugagaaccuacuauuuguu

SEQ ID NO: 824651 - RNA, 20 nt, Artificial Sequence
  Synthetic
uauagauaacuguauuuguu

SEQ ID NO: 824652 - RNA, 20 nt, Artificial Sequence
  Synthetic
auuuauauaucuccuuuguu

SEQ ID NO: 824653 - RNA, 20 nt, Artificial Sequence
  Synthetic
aaaacaaugcuggcuuuguu

SEQ ID NO: 824654 - RNA, 20 nt, Artificial Sequence
  Synthetic
uugcuuaaagcugcuuuguu

SEQ ID NO: 824655 - RNA, 20 nt, Artificial Sequence
  Synthetic
ucauccaaaauugcuuuguu

SEQ ID NO: 824656 - RNA, 20 nt, Artificial Sequence
  Synthetic
uuucuaguguuuucuuuguu

SEQ ID NO: 824657 - RNA, 20 nt, Artificial Sequence
  Synthetic
aaauuuaauuuaaguuuguu

SEQ ID NO: 824658 - RNA, 20 nt, Artificial Sequence
  Synthetic
auuuaaccaauagguuuguu

SEQ ID NO: 824659 - RNA, 20 nt, Artificial Sequence
  Synthetic
uccuuaaauuuuuguuuguu

SEQ ID NO: 824660 - RNA, 20 nt, Artificial Sequence
  Synthetic
cacuguaauucaauuuuguu

SEQ ID NO: 824661 - RNA, 20 nt, Artificial Sequence
  Synthetic
uuuccuucagauauuuuguu

SEQ ID NO: 824662 - RNA, 20 nt, Artificial Sequence
  Synthetic
auacucuuuugucuuuuguu

SEQ ID NO: 824663 - RNA, 20 nt, Artificial Sequence
  Synthetic
caucgcuuguuucuuuuguu

SEQ ID NO: 824664 - RNA, 20 nt, Artificial Sequence
  Synthetic
uagccagugaggguuuuguu

SEQ ID NO: 824665 - RNA, 20 nt, Artificial Sequence
  Synthetic
ucuuuuuauuacuuuuuguu

SEQ ID NO: 824666 - RNA, 20 nt, Artificial Sequence
  Synthetic
cguaugugugucuuuuuguu

SEQ ID NO: 824667 - RNA, 20 nt, Artificial Sequence
  Synthetic
ugccuucugagguuuuuguu

SEQ ID NO: 824668 - RNA, 20 nt, Artificial Sequence
  Synthetic
auaggucuuuuguuuuuguu

SEQ ID NO: 824669 - RNA, 20 nt, Artificial Sequence
  Synthetic
ucucagaaaaaaaaaaauuu

SEQ ID NO: 824670 - RNA, 20 nt, Artificial Sequence
  Synthetic
auuggacagacaaaaaauuu

SEQ ID NO: 824671 - RNA, 20 nt, Artificial Sequence
  Synthetic
auaaaaaagauaaaaaauuu

SEQ ID NO: 824672 - RNA, 20 nt, Artificial Sequence
  Synthetic
uaacucuuagacaaaaauuu

SEQ ID NO: 824673 - RNA, 20 nt, Artificial Sequence
  Synthetic
aggaagguauagaaaaauuu

SEQ ID NO: 824674 - RNA, 20 nt, Artificial Sequence
  Synthetic
acauaaaacuaucaaaauuu

SEQ ID NO: 824675 - RNA, 20 nt, Artificial Sequence
  Synthetic
uaccaaaauagucaaaauuu

SEQ ID NO: 824676 - RNA, 20 nt, Artificial Sequence
  Synthetic
ucacucuuggaagaaaauuu

SEQ ID NO: 824677 - RNA, 20 nt, Artificial Sequence
  Synthetic
uguggccugugggaaaauuu

SEQ ID NO: 824678 - RNA, 20 nt, Artificial Sequence
  Synthetic
ugcuagauuugcuaaaauuu

SEQ ID NO: 824679 - RNA, 20 nt, Artificial Sequence
  Synthetic
auccaacuuuaguaaaauuu

SEQ ID NO: 824680 - RNA, 20 nt, Artificial Sequence
  Synthetic
accuggcacaauuaaaauuu

SEQ ID NO: 824681 - RNA, 20 nt, Artificial Sequence
  Synthetic
aaguauauauguuaaaauuu

SEQ ID NO: 824682 - RNA, 20 nt, Artificial Sequence
  Synthetic
augauaaacaacacaaauuu

SEQ ID NO: 824683 - RNA, 20 nt, Artificial Sequence
  Synthetic
uaauggagcgagacaaauuu

SEQ ID NO: 824684 - RNA, 20 nt, Artificial Sequence
  Synthetic
caccauuuugaugcaaauuu

SEQ ID NO: 824685 - RNA, 20 nt, Artificial Sequence
  Synthetic
auuuuuccccuugcaaauuu

SEQ ID NO: 824686 - RNA, 20 nt, Artificial Sequence
  Synthetic
aauugcuauaacucaaauuu

SEQ ID NO: 824687 - RNA, 20 nt, Artificial Sequence
  Synthetic
uacuugacaaucucaaauuu

SEQ ID NO: 824688 - RNA, 20 nt, Artificial Sequence
  Synthetic
uuguaggcaugaagaaauuu

SEQ ID NO: 824689 - RNA, 20 nt, Artificial Sequence
  Synthetic
auccugacucuaagaaauuu

SEQ ID NO: 824690 - RNA, 20 nt, Artificial Sequence
  Synthetic
aaauauuuuaacagaaauuu

SEQ ID NO: 824691 - RNA, 20 nt, Artificial Sequence
  Synthetic
ugaaugaguucgagaaauuu

SEQ ID NO: 824692 - RNA, 20 nt, Artificial Sequence
  Synthetic
aaggaucagaaacgaaauuu

SEQ ID NO: 824693 - RNA, 20 nt, Artificial Sequence
  Synthetic
cuuuuacagccaggaaauuu

SEQ ID NO: 824694 - RNA, 20 nt, Artificial Sequence
  Synthetic
uauauacacagaggaaauuu

SEQ ID NO: 824695 - RNA, 20 nt, Artificial Sequence
  Synthetic
uuuucgaauacuggaaauuu

SEQ ID NO: 824696 - RNA, 20 nt, Artificial Sequence
  Synthetic
caaucaaaauaaugaaauuu

SEQ ID NO: 824697 - RNA, 20 nt, Artificial Sequence
  Synthetic
uugagguaccucugaaauuu

SEQ ID NO: 824698 - RNA, 20 nt, Artificial Sequence
  Synthetic
uuuuuguaucaaauaaauuu

SEQ ID NO: 824699 - RNA, 20 nt, Artificial Sequence
  Synthetic
uuuuauaauggaauaaauuu

SEQ ID NO: 824700 - RNA, 20 nt, Artificial Sequence
  Synthetic
aauuguaagauaauaaauuu

SEQ ID NO: 824701 - RNA, 20 nt, Artificial Sequence
  Synthetic
cacaaagucuuaauaaauuu

SEQ ID NO: 824702 - RNA, 20 nt, Artificial Sequence
  Synthetic
ugauuuugucauauaaauuu

SEQ ID NO: 824703 - RNA, 20 nt, Artificial Sequence
  Synthetic
aaaaauugugguauaaauuu

SEQ ID NO: 824704 - RNA, 20 nt, Artificial Sequence
  Synthetic
cacacuucuguacuaaauuu

SEQ ID NO: 824705 - RNA, 20 nt, Artificial Sequence
  Synthetic
auguugccuaaucuaaauuu

SEQ ID NO: 824706 - RNA, 20 nt, Artificial Sequence
  Synthetic
aaucauguauaaguaaauuu

SEQ ID NO: 824707 - RNA, 20 nt, Artificial Sequence
  Synthetic
ugggaacauguaguaaauuu

SEQ ID NO: 824708 - RNA, 20 nt, Artificial Sequence
  Synthetic
uaagauaaagugguaaauuu

SEQ ID NO: 824709 - RNA, 20 nt, Artificial Sequence
  Synthetic
ucaguaacagauguaaauuu

SEQ ID NO: 824710 - RNA, 20 nt, Artificial Sequence
  Synthetic
ugguuuggcaaauuaaauuu

SEQ ID NO: 824711 - RNA, 20 nt, Artificial Sequence
  Synthetic
aaaacuugcuaauuaaauuu

SEQ ID NO: 824712 - RNA, 20 nt, Artificial Sequence
  Synthetic
auaauacauugauuaaauuu

SEQ ID NO: 824713 - RNA, 20 nt, Artificial Sequence
  Synthetic
aguacauggcccuuaaauuu

SEQ ID NO: 824714 - RNA, 20 nt, Artificial Sequence
  Synthetic
ucucacuccaauuuaaauuu

SEQ ID NO: 824715 - RNA, 20 nt, Artificial Sequence
  Synthetic
uuagugauuuuuuuaaauuu

SEQ ID NO: 824716 - RNA, 20 nt, Artificial Sequence
  Synthetic
uuaaaaagcaaaaacaauuu

SEQ ID NO: 824717 - RNA, 20 nt, Artificial Sequence
  Synthetic
uuucaguguuuaaacaauuu

SEQ ID NO: 824718 - RNA, 20 nt, Artificial Sequence
  Synthetic
ugcaaagcaaaacacaauuu

SEQ ID NO: 824719 - RNA, 20 nt, Artificial Sequence
  Synthetic
aguuauaguacauacaauuu

SEQ ID NO: 824720 - RNA, 20 nt, Artificial Sequence
  Synthetic
ugaauguauugauacaauuu

SEQ ID NO: 824721 - RNA, 20 nt, Artificial Sequence
  Synthetic
cuuacauauauauacaauuu

SEQ ID NO: 824722 - RNA, 20 nt, Artificial Sequence
  Synthetic
agugaguaaugguacaauuu

SEQ ID NO: 824723 - RNA, 20 nt, Artificial Sequence
  Synthetic
aagucuacccauuacaauuu

SEQ ID NO: 824724 - RNA, 20 nt, Artificial Sequence
  Synthetic
auggugauuuauuacaauuu

SEQ ID NO: 824725 - RNA, 20 nt, Artificial Sequence
  Synthetic
agauacagugcuuacaauuu

SEQ ID NO: 824726 - RNA, 20 nt, Artificial Sequence
  Synthetic
aauuuauuaucuuacaauuu

SEQ ID NO: 824727 - RNA, 20 nt, Artificial Sequence
  Synthetic
ccucuggguuagcccaauuu

SEQ ID NO: 824728 - RNA, 20 nt, Artificial Sequence
  Synthetic
caauccauuugagccaauuu

SEQ ID NO: 824729 - RNA, 20 nt, Artificial Sequence
  Synthetic
caauaaauccaugccaauuu

SEQ ID NO: 824730 - RNA, 20 nt, Artificial Sequence
  Synthetic
uacaauuuauuguccaauuu

SEQ ID NO: 824731 - RNA, 20 nt, Artificial Sequence
  Synthetic
ucuuguccauuuuccaauuu

SEQ ID NO: 824732 - RNA, 20 nt, Artificial Sequence
  Synthetic
agaaccuaacaaagcaauuu

SEQ ID NO: 824733 - RNA, 20 nt, Artificial Sequence
  Synthetic
ccacaagaugaaagcaauuu

SEQ ID NO: 824734 - RNA, 20 nt, Artificial Sequence
  Synthetic
aacuaauguucaagcaauuu

SEQ ID NO: 824735 - RNA, 20 nt, Artificial Sequence
  Synthetic
ugguuaagcuccagcaauuu

SEQ ID NO: 824736 - RNA, 20 nt, Artificial Sequence
  Synthetic
cagauuuauaucagcaauuu

SEQ ID NO: 824737 - RNA, 20 nt, Artificial Sequence
  Synthetic
uuucaauauaaaggcaauuu

SEQ ID NO: 824738 - RNA, 20 nt, Artificial Sequence
  Synthetic
aaagucagcucgggcaauuu

SEQ ID NO: 824739 - RNA, 20 nt, Artificial Sequence
  Synthetic
cagaguuaagaaugcaauuu

SEQ ID NO: 824740 - RNA, 20 nt, Artificial Sequence
  Synthetic
cauauauaaaacaucaauuu

SEQ ID NO: 824741 - RNA, 20 nt, Artificial Sequence
  Synthetic
cauacauaaaauaucaauuu

SEQ ID NO: 824742 - RNA, 20 nt, Artificial Sequence
  Synthetic
auucagagguuccucaauuu

SEQ ID NO: 824743 - RNA, 20 nt, Artificial Sequence
  Synthetic
aacagaugacaagucaauuu

SEQ ID NO: 824744 - RNA, 20 nt, Artificial Sequence
  Synthetic
uccaaguauguggucaauuu

SEQ ID NO: 824745 - RNA, 20 nt, Artificial Sequence
  Synthetic
ugauguuagggugucaauuu

SEQ ID NO: 824746 - RNA, 20 nt, Artificial Sequence
  Synthetic
uagaucccauuugucaauuu

SEQ ID NO: 824747 - RNA, 20 nt, Artificial Sequence
  Synthetic
uagauuccauuugucaauuu

SEQ ID NO: 824748 - RNA, 20 nt, Artificial Sequence
  Synthetic
uaucuaaacgaauucaauuu

SEQ ID NO: 824749 - RNA, 20 nt, Artificial Sequence
  Synthetic
uuaauagaaacauucaauuu

SEQ ID NO: 824750 - RNA, 20 nt, Artificial Sequence
  Synthetic
uuggaacugauauucaauuu

SEQ ID NO: 824751 - RNA, 20 nt, Artificial Sequence
  Synthetic
cucauaaacaacuucaauuu

SEQ ID NO: 824752 - RNA, 20 nt, Artificial Sequence
  Synthetic
auaagugaucaguucaauuu

SEQ ID NO: 824753 - RNA, 20 nt, Artificial Sequence
  Synthetic
auuguuuucuauuucaauuu

SEQ ID NO: 824754 - RNA, 20 nt, Artificial Sequence
  Synthetic
aauguaaaacuuuucaauuu

SEQ ID NO: 824755 - RNA, 20 nt, Artificial Sequence
  Synthetic
uuugagaagaacaagaauuu

SEQ ID NO: 824756 - RNA, 20 nt, Artificial Sequence
  Synthetic
aaggauaacaugaagaauuu

SEQ ID NO: 824757 - RNA, 20 nt, Artificial Sequence
  Synthetic
auuguugacucuaagaauuu

SEQ ID NO: 824758 - RNA, 20 nt, Artificial Sequence
  Synthetic
cagaagguuuuuaagaauuu

SEQ ID NO: 824759 - RNA, 20 nt, Artificial Sequence
  Synthetic
uuaauccuggaacagaauuu

SEQ ID NO: 824760 - RNA, 20 nt, Artificial Sequence
  Synthetic
uugauccagagacagaauuu

SEQ ID NO: 824761 - RNA, 20 nt, Artificial Sequence
  Synthetic
uuguaggaaaugcagaauuu

SEQ ID NO: 824762 - RNA, 20 nt, Artificial Sequence
  Synthetic
aagaaggaacaucagaauuu

SEQ ID NO: 824763 - RNA, 20 nt, Artificial Sequence
  Synthetic
caacugagauaucagaauuu

SEQ ID NO: 824764 - RNA, 20 nt, Artificial Sequence
  Synthetic
uuuuaaggugcucagaauuu

SEQ ID NO: 824765 - RNA, 20 nt, Artificial Sequence
  Synthetic
uuuauugggguucagaauuu

SEQ ID NO: 824766 - RNA, 20 nt, Artificial Sequence
  Synthetic
auagcuaaaggggagaauuu

SEQ ID NO: 824767 - RNA, 20 nt, Artificial Sequence
  Synthetic
uuuaguucagcugagaauuu

SEQ ID NO: 824768 - RNA, 20 nt, Artificial Sequence
  Synthetic
auucaauaaaaauagaauuu

SEQ ID NO: 824769 - RNA, 20 nt, Artificial Sequence
  Synthetic
auuucugcaucauagaauuu

SEQ ID NO: 824770 - RNA, 20 nt, Artificial Sequence
  Synthetic
agcuauaaaagauagaauuu

SEQ ID NO: 824771 - RNA, 20 nt, Artificial Sequence
  Synthetic
uuauaacuuucuuagaauuu

SEQ ID NO: 824772 - RNA, 20 nt, Artificial Sequence
  Synthetic
aaugcuaaaaguuagaauuu

SEQ ID NO: 824773 - RNA, 20 nt, Artificial Sequence
  Synthetic
ccacaguaaaaaaggaauuu

SEQ ID NO: 824774 - RNA, 20 nt, Artificial Sequence
  Synthetic
ccuuuguuuugaaggaauuu

SEQ ID NO: 824775 - RNA, 20 nt, Artificial Sequence
  Synthetic
auaugugugcucaggaauuu

SEQ ID NO: 824776 - RNA, 20 nt, Artificial Sequence
  Synthetic
aaaucaacaaugaggaauuu

SEQ ID NO: 824777 - RNA, 20 nt, Artificial Sequence
  Synthetic
aggaguuggaaauggaauuu

SEQ ID NO: 824778 - RNA, 20 nt, Artificial Sequence
  Synthetic
caaaaccaugguuggaauuu

SEQ ID NO: 824779 - RNA, 20 nt, Artificial Sequence
  Synthetic
aucaugauacuuuggaauuu

SEQ ID NO: 824780 - RNA, 20 nt, Artificial Sequence
  Synthetic
ucuguugacagaaugaauuu

SEQ ID NO: 824781 - RNA, 20 nt, Artificial Sequence
  Synthetic
cucaggagaauaaugaauuu

SEQ ID NO: 824782 - RNA, 20 nt, Artificial Sequence
  Synthetic
aaugacaucaccaugaauuu

SEQ ID NO: 824783 - RNA, 20 nt, Artificial Sequence
  Synthetic
cauggaugaaagaugaauuu

SEQ ID NO: 824784 - RNA, 20 nt, Artificial Sequence
  Synthetic
uaggugauuuguaugaauuu

SEQ ID NO: 824785 - RNA, 20 nt, Artificial Sequence
  Synthetic
ccccuucacauucugaauuu

SEQ ID NO: 824786 - RNA, 20 nt, Artificial Sequence
  Synthetic
uuggauaugauucugaauuu

SEQ ID NO: 824787 - RNA, 20 nt, Artificial Sequence
  Synthetic
uucuuuacauuucugaauuu

SEQ ID NO: 824788 - RNA, 20 nt, Artificial Sequence
  Synthetic
aauagcacugaagugaauuu

SEQ ID NO: 824789 - RNA, 20 nt, Artificial Sequence
  Synthetic
aagaauaugccugugaauuu

SEQ ID NO: 824790 - RNA, 20 nt, Artificial Sequence
  Synthetic
auuaagauuucauugaauuu

SEQ ID NO: 824791 - RNA, 20 nt, Artificial Sequence
  Synthetic
augauaauuuacuugaauuu

SEQ ID NO: 824792 - RNA, 20 nt, Artificial Sequence
  Synthetic
uucugucuauuguugaauuu

SEQ ID NO: 824793 - RNA, 20 nt, Artificial Sequence
  Synthetic
uaaagaaagcuuuugaauuu

SEQ ID NO: 824794 - RNA, 20 nt, Artificial Sequence
  Synthetic
aaugguauugaaaauaauuu

SEQ ID NO: 824795 - RNA, 20 nt, Artificial Sequence
  Synthetic
ucucuguuuuaaaauaauuu

SEQ ID NO: 824796 - RNA, 20 nt, Artificial Sequence
  Synthetic
caccaauauagaaauaauuu

SEQ ID NO: 824797 - RNA, 20 nt, Artificial Sequence
  Synthetic
cccccgaacaugaauaauuu

SEQ ID NO: 824798 - RNA, 20 nt, Artificial Sequence
  Synthetic
auucuugacauuaauaauuu

SEQ ID NO: 824799 - RNA, 20 nt, Artificial Sequence
  Synthetic
auaaagaacagucauaauuu

SEQ ID NO: 824800 - RNA, 20 nt, Artificial Sequence
  Synthetic
aaaaagaaagcugauaauuu

SEQ ID NO: 824801 - RNA, 20 nt, Artificial Sequence
  Synthetic
aguguuauuuucuauaauuu

SEQ ID NO: 824802 - RNA, 20 nt, Artificial Sequence
  Synthetic
uugcauuaaaauuauaauuu

SEQ ID NO: 824803 - RNA, 20 nt, Artificial Sequence
  Synthetic
uuucuuucuuccacuaauuu

SEQ ID NO: 824804 - RNA, 20 nt, Artificial Sequence
  Synthetic
uuaauugguauuacuaauuu

SEQ ID NO: 824805 - RNA, 20 nt, Artificial Sequence
  Synthetic
cuguucaagucaccuaauuu

SEQ ID NO: 824806 - RNA, 20 nt, Artificial Sequence
  Synthetic
aacguggaggcagcuaauuu

SEQ ID NO: 824807 - RNA, 20 nt, Artificial Sequence
  Synthetic
uagcaguguuauucuaauuu

SEQ ID NO: 824808 - RNA, 20 nt, Artificial Sequence
  Synthetic
uuuacuuuuugaaguaauuu

SEQ ID NO: 824809 - RNA, 20 nt, Artificial Sequence
  Synthetic
uauuuaauagucuguaauuu

SEQ ID NO: 824810 - RNA, 20 nt, Artificial Sequence
  Synthetic
ucuuuaugaugaauuaauuu

SEQ ID NO: 824811 - RNA, 20 nt, Artificial Sequence
  Synthetic
uuacuguuuacuauuaauuu

SEQ ID NO: 824812 - RNA, 20 nt, Artificial Sequence
  Synthetic
aauaaaauauguauuaauuu

SEQ ID NO: 824813 - RNA, 20 nt, Artificial Sequence
  Synthetic
ucuaagacuuguauuaauuu

SEQ ID NO: 824814 - RNA, 20 nt, Artificial Sequence
  Synthetic
aguguuuugagccuuaauuu

SEQ ID NO: 824815 - RNA, 20 nt, Artificial Sequence
  Synthetic
uacugcaacucuguuaauuu

SEQ ID NO: 824816 - RNA, 20 nt, Artificial Sequence
  Synthetic
cuccaacaaauauuuaauuu

SEQ ID NO: 824817 - RNA, 20 nt, Artificial Sequence
  Synthetic
uuuuuuuucaacuuuaauuu

SEQ ID NO: 824818 - RNA, 20 nt, Artificial Sequence
  Synthetic
ucaucuggucucuuuaauuu

SEQ ID NO: 824819 - RNA, 20 nt, Artificial Sequence
  Synthetic
ucuaauauccauuuuaauuu

SEQ ID NO: 824820 - RNA, 20 nt, Artificial Sequence
  Synthetic
uuucacagucauuuuaauuu

SEQ ID NO: 824821 - RNA, 20 nt, Artificial Sequence
  Synthetic
uaaugaucuacuuuuaauuu

SEQ ID NO: 824822 - RNA, 20 nt, Artificial Sequence
  Synthetic
acaaaaauaacuaaacauuu

SEQ ID NO: 824823 - RNA, 20 nt, Artificial Sequence
  Synthetic
aucauuuuauuuaaacauuu

SEQ ID NO: 824824 - RNA, 20 nt, Artificial Sequence
  Synthetic
aaauauauuuuuaaacauuu

SEQ ID NO: 824825 - RNA, 20 nt, Artificial Sequence
  Synthetic
aaauaugaaaaucaacauuu

SEQ ID NO: 824826 - RNA, 20 nt, Artificial Sequence
  Synthetic
cagugucaaauucaacauuu

SEQ ID NO: 824827 - RNA, 20 nt, Artificial Sequence
  Synthetic
ugagauauuguagaacauuu

SEQ ID NO: 824828 - RNA, 20 nt, Artificial Sequence
  Synthetic
uaaaaucacauggaacauuu

SEQ ID NO: 824829 - RNA, 20 nt, Artificial Sequence
  Synthetic
cuuuagcauuacuaacauuu

SEQ ID NO: 824830 - RNA, 20 nt, Artificial Sequence
  Synthetic
uacuacaguaaguaacauuu

SEQ ID NO: 824831 - RNA, 20 nt, Artificial Sequence
  Synthetic
aacaaagauagguaacauuu

SEQ ID NO: 824832 - RNA, 20 nt, Artificial Sequence
  Synthetic
cucccuuaauauuaacauuu

SEQ ID NO: 824833 - RNA, 20 nt, Artificial Sequence
  Synthetic
uguuaggugcaaacacauuu

SEQ ID NO: 824834 - RNA, 20 nt, Artificial Sequence
  Synthetic
uuucaucugaagacacauuu

SEQ ID NO: 824835 - RNA, 20 nt, Artificial Sequence
  Synthetic
agguuucaacauacacauuu

SEQ ID NO: 824836 - RNA, 20 nt, Artificial Sequence
  Synthetic
cgggcuugagauacacauuu

SEQ ID NO: 824837 - RNA, 20 nt, Artificial Sequence
  Synthetic
cuguucagcaaaccacauuu

SEQ ID NO: 824838 - RNA, 20 nt, Artificial Sequence
  Synthetic
auaagcucagucccacauuu

SEQ ID NO: 824839 - RNA, 20 nt, Artificial Sequence
  Synthetic
uugggacugcuuccacauuu

SEQ ID NO: 824840 - RNA, 20 nt, Artificial Sequence
  Synthetic
aaauaugaggaugcacauuu

SEQ ID NO: 824841 - RNA, 20 nt, Artificial Sequence
  Synthetic
ccuggaauauaugcacauuu

SEQ ID NO: 824842 - RNA, 20 nt, Artificial Sequence
  Synthetic
aaucccaaugcugcacauuu

SEQ ID NO: 824843 - RNA, 20 nt, Artificial Sequence
  Synthetic
aaauaaguaaaaucacauuu

SEQ ID NO: 824844 - RNA, 20 nt, Artificial Sequence
  Synthetic
uccccaaguauuucacauuu

SEQ ID NO: 824845 - RNA, 20 nt, Artificial Sequence
  Synthetic
aaucuacuucuuucacauuu

SEQ ID NO: 824846 - RNA, 20 nt, Artificial Sequence
  Synthetic
ucuaucauugucggacauuu

SEQ ID NO: 824847 - RNA, 20 nt, Artificial Sequence
  Synthetic
ucuaucacugauggacauuu

SEQ ID NO: 824848 - RNA, 20 nt, Artificial Sequence
  Synthetic
ucauuagcugauggacauuu

SEQ ID NO: 824849 - RNA, 20 nt, Artificial Sequence
  Synthetic
ucuaucauugauggacauuu

SEQ ID NO: 824850 - RNA, 20 nt, Artificial Sequence
  Synthetic
ucuauuauugauggacauuu

SEQ ID NO: 824851 - RNA, 20 nt, Artificial Sequence
  Synthetic
ucauuuauugauggacauuu

SEQ ID NO: 824852 - RNA, 20 nt, Artificial Sequence
  Synthetic
ucuaucacuguuggacauuu

SEQ ID NO: 824853 - RNA, 20 nt, Artificial Sequence
  Synthetic
ucuaucauuguuggacauuu

SEQ ID NO: 824854 - RNA, 20 nt, Artificial Sequence
  Synthetic
ccucaccacaacugacauuu

SEQ ID NO: 824855 - RNA, 20 nt, Artificial Sequence
  Synthetic
uuuuuauacuacugacauuu

SEQ ID NO: 824856 - RNA, 20 nt, Artificial Sequence
  Synthetic
auaugacacucaauacauuu

SEQ ID NO: 824857 - RNA, 20 nt, Artificial Sequence
  Synthetic
uaguacaguuacauacauuu

SEQ ID NO: 824858 - RNA, 20 nt, Artificial Sequence
  Synthetic
aaacucuguagacuacauuu

SEQ ID NO: 824859 - RNA, 20 nt, Artificial Sequence
  Synthetic
uauuuucaaaaccuacauuu

SEQ ID NO: 824860 - RNA, 20 nt, Artificial Sequence
  Synthetic
uauuuuaagucucuacauuu

SEQ ID NO: 824861 - RNA, 20 nt, Artificial Sequence
  Synthetic
agaagacugagucuacauuu

SEQ ID NO: 824862 - RNA, 20 nt, Artificial Sequence
  Synthetic
cucaagcauaaauuacauuu

SEQ ID NO: 824863 - RNA, 20 nt, Artificial Sequence
  Synthetic
uaaaaacauuaauuacauuu

SEQ ID NO: 824864 - RNA, 20 nt, Artificial Sequence
  Synthetic
uuauaaacauuguuacauuu

SEQ ID NO: 824865 - RNA, 20 nt, Artificial Sequence
  Synthetic
uuaccagaacauuuacauuu

SEQ ID NO: 824866 - RNA, 20 nt, Artificial Sequence
  Synthetic
ucucgauggucuuuacauuu

SEQ ID NO: 824867 - RNA, 20 nt, Artificial Sequence
  Synthetic
aggcaaguuucuuuacauuu

SEQ ID NO: 824868 - RNA, 20 nt, Artificial Sequence
  Synthetic
aagguuuguuuuuuacauuu

SEQ ID NO: 824869 - RNA, 20 nt, Artificial Sequence
  Synthetic
ugggauuuuucaaaccauuu

SEQ ID NO: 824870 - RNA, 20 nt, Artificial Sequence
  Synthetic
cuuuauccuuuuaaccauuu

SEQ ID NO: 824871 - RNA, 20 nt, Artificial Sequence
  Synthetic
cauuguuuuuugcaccauuu

SEQ ID NO: 824872 - RNA, 20 nt, Artificial Sequence
  Synthetic
uaaugaggaauagaccauuu

SEQ ID NO: 824873 - RNA, 20 nt, Artificial Sequence
  Synthetic
auugugugauuugaccauuu

SEQ ID NO: 824874 - RNA, 20 nt, Artificial Sequence
  Synthetic
uacacaagaaaauaccauuu

SEQ ID NO: 824875 - RNA, 20 nt, Artificial Sequence
  Synthetic
aacccccaccacuaccauuu

SEQ ID NO: 824876 - RNA, 20 nt, Artificial Sequence
  Synthetic
cucaagugauccacccauuu

SEQ ID NO: 824877 - RNA, 20 nt, Artificial Sequence
  Synthetic
aaauaacccucuacccauuu

SEQ ID NO: 824878 - RNA, 20 nt, Artificial Sequence
  Synthetic
uguaggcuuucuucccauuu

SEQ ID NO: 824879 - RNA, 20 nt, Artificial Sequence
  Synthetic
ucaugugagugaggccauuu

SEQ ID NO: 824880 - RNA, 20 nt, Artificial Sequence
  Synthetic
ucaaugauagauggccauuu

SEQ ID NO: 824881 - RNA, 20 nt, Artificial Sequence
  Synthetic
ugucaacccagcugccauuu

SEQ ID NO: 824882 - RNA, 20 nt, Artificial Sequence
  Synthetic
aaugugaagacgugccauuu

SEQ ID NO: 824883 - RNA, 20 nt, Artificial Sequence
  Synthetic
cuucagcccuauugccauuu

SEQ ID NO: 824884 - RNA, 20 nt, Artificial Sequence
  Synthetic
uucccaaaguuuauccauuu

SEQ ID NO: 824885 - RNA, 20 nt, Artificial Sequence
  Synthetic
ucaucucagaaccuccauuu

SEQ ID NO: 824886 - RNA, 20 nt, Artificial Sequence
  Synthetic
cuccaaacuauucuccauuu

SEQ ID NO: 824887 - RNA, 20 nt, Artificial Sequence
  Synthetic
uucuucauugguuuccauuu

SEQ ID NO: 824888 - RNA, 20 nt, Artificial Sequence
  Synthetic
uacuuuauuauuuuccauuu

SEQ ID NO: 824889 - RNA, 20 nt, Artificial Sequence
  Synthetic
acauaaagaaaaaagcauuu

SEQ ID NO: 824890 - RNA, 20 nt, Artificial Sequence
  Synthetic
acuuccaaucccaagcauuu

SEQ ID NO: 824891 - RNA, 20 nt, Artificial Sequence
  Synthetic
uuaauccaucugaagcauuu

SEQ ID NO: 824892 - RNA, 20 nt, Artificial Sequence
  Synthetic
ugucuugagcuuaagcauuu

SEQ ID NO: 824893 - RNA, 20 nt, Artificial Sequence
  Synthetic
uuguaaaacagacagcauuu

SEQ ID NO: 824894 - RNA, 20 nt, Artificial Sequence
  Synthetic
ccauaucacuaucagcauuu

SEQ ID NO: 824895 - RNA, 20 nt, Artificial Sequence
  Synthetic
ucguaucacuaucagcauuu

SEQ ID NO: 824896 - RNA, 20 nt, Artificial Sequence
  Synthetic
ccaagaguuguucagcauuu

SEQ ID NO: 824897 - RNA, 20 nt, Artificial Sequence
  Synthetic
aggacagcacaagagcauuu

SEQ ID NO: 824898 - RNA, 20 nt, Artificial Sequence
  Synthetic
ucuaucauugaugagcauuu

SEQ ID NO: 824899 - RNA, 20 nt, Artificial Sequence
  Synthetic
aauucauagaaguagcauuu

SEQ ID NO: 824900 - RNA, 20 nt, Artificial Sequence
  Synthetic
uaaacuugagcuuagcauuu

SEQ ID NO: 824901 - RNA, 20 nt, Artificial Sequence
  Synthetic
aacuaacucaacacgcauuu

SEQ ID NO: 824902 - RNA, 20 nt, Artificial Sequence
  Synthetic
acuguaaaauuaaggcauuu

SEQ ID NO: 824903 - RNA, 20 nt, Artificial Sequence
  Synthetic
uaaaaacuaaacaggcauuu

SEQ ID NO: 824904 - RNA, 20 nt, Artificial Sequence
  Synthetic
uaaguaaacccuaggcauuu

SEQ ID NO: 824905 - RNA, 20 nt, Artificial Sequence
  Synthetic
acaaaaacacuuaggcauuu

SEQ ID NO: 824906 - RNA, 20 nt, Artificial Sequence
  Synthetic
ccacaucaccaucggcauuu

SEQ ID NO: 824907 - RNA, 20 nt, Artificial Sequence
  Synthetic
cgccuguaaucucggcauuu

SEQ ID NO: 824908 - RNA, 20 nt, Artificial Sequence
  Synthetic
ucaucugccaaugggcauuu

SEQ ID NO: 824909 - RNA, 20 nt, Artificial Sequence
  Synthetic
uccaucacugaugggcauuu

SEQ ID NO: 824910 - RNA, 20 nt, Artificial Sequence
  Synthetic
ucuaucacugaugggcauuu

SEQ ID NO: 824911 - RNA, 20 nt, Artificial Sequence
  Synthetic
ucuaccauugaugggcauuu

SEQ ID NO: 824912 - RNA, 20 nt, Artificial Sequence
  Synthetic
uauaucauugaugggcauuu

SEQ ID NO: 824913 - RNA, 20 nt, Artificial Sequence
  Synthetic
ucuaucauugaugggcauuu

SEQ ID NO: 824914 - RNA, 20 nt, Artificial Sequence
  Synthetic
uugucgauugaugggcauuu

SEQ ID NO: 824915 - RNA, 20 nt, Artificial Sequence
  Synthetic
ucuaucacuggugggcauuu

SEQ ID NO: 824916 - RNA, 20 nt, Artificial Sequence
  Synthetic
aaauacuaaaaaaugcauuu

SEQ ID NO: 824917 - RNA, 20 nt, Artificial Sequence
  Synthetic
uuaauuuucaauaugcauuu

SEQ ID NO: 824918 - RNA, 20 nt, Artificial Sequence
  Synthetic
agggaucaugcuaugcauuu

SEQ ID NO: 824919 - RNA, 20 nt, Artificial Sequence
  Synthetic
uuuuuuagauguaugcauuu

SEQ ID NO: 824920 - RNA, 20 nt, Artificial Sequence
  Synthetic
caucuaaaagugcugcauuu

SEQ ID NO: 824921 - RNA, 20 nt, Artificial Sequence
  Synthetic
cauuaauuuccucugcauuu

SEQ ID NO: 824922 - RNA, 20 nt, Artificial Sequence
  Synthetic
agagacuuucacaaucauuu

SEQ ID NO: 824923 - RNA, 20 nt, Artificial Sequence
  Synthetic
uacuucucauuuaaucauuu

SEQ ID NO: 824924 - RNA, 20 nt, Artificial Sequence
  Synthetic
uaccuugaauaacaucauuu

SEQ ID NO: 824925 - RNA, 20 nt, Artificial Sequence
  Synthetic
cuauggaagaaauaucauuu

SEQ ID NO: 824926 - RNA, 20 nt, Artificial Sequence
  Synthetic
agaccacaaggguaucauuu

SEQ ID NO: 824927 - RNA, 20 nt, Artificial Sequence
  Synthetic
uuuucuaaguaaacucauuu

SEQ ID NO: 824928 - RNA, 20 nt, Artificial Sequence
  Synthetic
uaucagcaguaaacucauuu

SEQ ID NO: 824929 - RNA, 20 nt, Artificial Sequence
  Synthetic
ugaauaaaaaucacucauuu

SEQ ID NO: 824930 - RNA, 20 nt, Artificial Sequence
  Synthetic
uauagcugaaugucucauuu

SEQ ID NO: 824931 - RNA, 20 nt, Artificial Sequence
  Synthetic
agacuacacaugucucauuu

SEQ ID NO: 824932 - RNA, 20 nt, Artificial Sequence
  Synthetic
aggucccacugaagucauuu

SEQ ID NO: 824933 - RNA, 20 nt, Artificial Sequence
  Synthetic
cuuagaucccuuagucauuu

SEQ ID NO: 824934 - RNA, 20 nt, Artificial Sequence
  Synthetic
caccuaugaacccgucauuu

SEQ ID NO: 824935 - RNA, 20 nt, Artificial Sequence
  Synthetic
uugauaguaaucugucauuu

SEQ ID NO: 824936 - RNA, 20 nt, Artificial Sequence
  Synthetic
ucaaaucacacaauucauuu

SEQ ID NO: 824937 - RNA, 20 nt, Artificial Sequence
  Synthetic
ccauguguuaagauucauuu

SEQ ID NO: 824938 - RNA, 20 nt, Artificial Sequence
  Synthetic
cccccaguggcuauucauuu

SEQ ID NO: 824939 - RNA, 20 nt, Artificial Sequence
  Synthetic
caauacuguauuauucauuu

SEQ ID NO: 824940 - RNA, 20 nt, Artificial Sequence
  Synthetic
augcauuccuuccuucauuu

SEQ ID NO: 824941 - RNA, 20 nt, Artificial Sequence
  Synthetic
ccugcuuucauucuucauuu

SEQ ID NO: 824942 - RNA, 20 nt, Artificial Sequence
  Synthetic
cuaaaugaaauaguucauuu

SEQ ID NO: 824943 - RNA, 20 nt, Artificial Sequence
  Synthetic
uuauuuucauuauuucauuu

SEQ ID NO: 824944 - RNA, 20 nt, Artificial Sequence
  Synthetic
auuuagauauccuuucauuu

SEQ ID NO: 824945 - RNA, 20 nt, Artificial Sequence
  Synthetic
acaucauaacaguuucauuu

SEQ ID NO: 824946 - RNA, 20 nt, Artificial Sequence
  Synthetic
aaauuguucacguuucauuu

SEQ ID NO: 824947 - RNA, 20 nt, Artificial Sequence
  Synthetic
uguguuugcaauuuucauuu

SEQ ID NO: 824948 - RNA, 20 nt, Artificial Sequence
  Synthetic
augcacauccacaaagauuu

SEQ ID NO: 824949 - RNA, 20 nt, Artificial Sequence
  Synthetic
uuaagcugaaauaaagauuu

SEQ ID NO: 824950 - RNA, 20 nt, Artificial Sequence
  Synthetic
augcuuuguuauaaagauuu

SEQ ID NO: 824951 - RNA, 20 nt, Artificial Sequence
  Synthetic
auguauuaaaaagaagauuu

SEQ ID NO: 824952 - RNA, 20 nt, Artificial Sequence
  Synthetic
uuaucagcuuaagaagauuu

SEQ ID NO: 824953 - RNA, 20 nt, Artificial Sequence
  Synthetic
accuugaagguagaagauuu

SEQ ID NO: 824954 - RNA, 20 nt, Artificial Sequence
  Synthetic
auaaucaguugggaagauuu

SEQ ID NO: 824955 - RNA, 20 nt, Artificial Sequence
  Synthetic
aaaagucaacgauaagauuu

SEQ ID NO: 824956 - RNA, 20 nt, Artificial Sequence
  Synthetic
uuaagggauguguaagauuu

SEQ ID NO: 824957 - RNA, 20 nt, Artificial Sequence
  Synthetic
aaaauucagcaaacagauuu

SEQ ID NO: 824958 - RNA, 20 nt, Artificial Sequence
  Synthetic
cucaaagaccuuacagauuu

SEQ ID NO: 824959 - RNA, 20 nt, Artificial Sequence
  Synthetic
aaaugaucaguaccagauuu

SEQ ID NO: 824960 - RNA, 20 nt, Artificial Sequence
  Synthetic
cuuauaaaaccaucagauuu

SEQ ID NO: 824961 - RNA, 20 nt, Artificial Sequence
  Synthetic
accuccuucucuucagauuu

SEQ ID NO: 824962 - RNA, 20 nt, Artificial Sequence
  Synthetic
uuucagauuuuuucagauuu

SEQ ID NO: 824963 - RNA, 20 nt, Artificial Sequence
  Synthetic
acauucuaaaacagagauuu

SEQ ID NO: 824964 - RNA, 20 nt, Artificial Sequence
  Synthetic
acuauuucuuucagagauuu

SEQ ID NO: 824965 - RNA, 20 nt, Artificial Sequence
  Synthetic
caggauuuugguagagauuu

SEQ ID NO: 824966 - RNA, 20 nt, Artificial Sequence
  Synthetic
uuaucagcuuaaggagauuu

SEQ ID NO: 824967 - RNA, 20 nt, Artificial Sequence
  Synthetic
uacaauucaaaaugagauuu

SEQ ID NO: 824968 - RNA, 20 nt, Artificial Sequence
  Synthetic
uacaauucagaaugagauuu

SEQ ID NO: 824969 - RNA, 20 nt, Artificial Sequence
  Synthetic
aaugugaugacaugagauuu

SEQ ID NO: 824970 - RNA, 20 nt, Artificial Sequence
  Synthetic
uacaauucaagaugagauuu

SEQ ID NO: 824971 - RNA, 20 nt, Artificial Sequence
  Synthetic
uagaauucaagaugagauuu

SEQ ID NO: 824972 - RNA, 20 nt, Artificial Sequence
  Synthetic
aggaauucaagaugagauuu

SEQ ID NO: 824973 - RNA, 20 nt, Artificial Sequence
  Synthetic
uacauuucaagaugagauuu

SEQ ID NO: 824974 - RNA, 20 nt, Artificial Sequence
  Synthetic
uacaguucuagaugagauuu

SEQ ID NO: 824975 - RNA, 20 nt, Artificial Sequence
  Synthetic
uacaauuuaauaugagauuu

SEQ ID NO: 824976 - RNA, 20 nt, Artificial Sequence
  Synthetic
auuguuugaugcugagauuu

SEQ ID NO: 824977 - RNA, 20 nt, Artificial Sequence
  Synthetic
uacaauucaaggugagauuu

SEQ ID NO: 824978 - RNA, 20 nt, Artificial Sequence
  Synthetic
cauaauucaaggugagauuu

SEQ ID NO: 824979 - RNA, 20 nt, Artificial Sequence
  Synthetic
uuuuacaaggugugagauuu

SEQ ID NO: 824980 - RNA, 20 nt, Artificial Sequence
  Synthetic
uugacugcccugauagauuu

SEQ ID NO: 824981 - RNA, 20 nt, Artificial Sequence
  Synthetic
auaacuaaauuucuagauuu

SEQ ID NO: 824982 - RNA, 20 nt, Artificial Sequence
  Synthetic
auaucacccacaguagauuu

SEQ ID NO: 824983 - RNA, 20 nt, Artificial Sequence
  Synthetic
aucccuguuaguuuagauuu

SEQ ID NO: 824984 - RNA, 20 nt, Artificial Sequence
  Synthetic
ucuucaauaaacaucgauuu

SEQ ID NO: 824985 - RNA, 20 nt, Artificial Sequence
  Synthetic
aggcugugcugacaggauuu

SEQ ID NO: 824986 - RNA, 20 nt, Artificial Sequence
  Synthetic
cauaagaugaaagaggauuu

SEQ ID NO: 824987 - RNA, 20 nt, Artificial Sequence
  Synthetic
cacccacagagugaggauuu

SEQ ID NO: 824988 - RNA, 20 nt, Artificial Sequence
  Synthetic
ugcaauucaagacgggauuu

SEQ ID NO: 824989 - RNA, 20 nt, Artificial Sequence
  Synthetic
cccaugacaccuggggauuu

SEQ ID NO: 824990 - RNA, 20 nt, Artificial Sequence
  Synthetic
ccugaggugaacugggauuu

SEQ ID NO: 824991 - RNA, 20 nt, Artificial Sequence
  Synthetic
aaugcucuguagugggauuu

SEQ ID NO: 824992 - RNA, 20 nt, Artificial Sequence
  Synthetic
uuucaugagcuuugggauuu

SEQ ID NO: 824993 - RNA, 20 nt, Artificial Sequence
  Synthetic
augucaucauggauggauuu

SEQ ID NO: 824994 - RNA, 20 nt, Artificial Sequence
  Synthetic
cuccuggggacaguggauuu

SEQ ID NO: 824995 - RNA, 20 nt, Artificial Sequence
  Synthetic
uggaaugcagugguggauuu

SEQ ID NO: 824996 - RNA, 20 nt, Artificial Sequence
  Synthetic
uuaccagaggcuguggauuu

SEQ ID NO: 824997 - RNA, 20 nt, Artificial Sequence
  Synthetic
agcugccauauuguggauuu

SEQ ID NO: 824998 - RNA, 20 nt, Artificial Sequence
  Synthetic
ucuaaucuccauuuggauuu

SEQ ID NO: 824999 - RNA, 20 nt, Artificial Sequence
  Synthetic
cuauuguuuuauuuggauuu

SEQ ID NO: 825000 - RNA, 20 nt, Artificial Sequence
  Synthetic
auuggaaguguuuuggauuu

SEQ ID NO: 825001 - RNA, 20 nt, Artificial Sequence
  Synthetic
uuuuagaguuuuuuggauuu

SEQ ID NO: 825002 - RNA, 20 nt, Artificial Sequence
  Synthetic
cuuccucagaaaaaugauuu

SEQ ID NO: 825003 - RNA, 20 nt, Artificial Sequence
  Synthetic
uuuguguacugaaaugauuu

SEQ ID NO: 825004 - RNA, 20 nt, Artificial Sequence
  Synthetic
caggguuauagcaaugauuu

SEQ ID NO: 825005 - RNA, 20 nt, Artificial Sequence
  Synthetic
cugacuucauagaaugauuu

SEQ ID NO: 825006 - RNA, 20 nt, Artificial Sequence
  Synthetic
aaucugcucuugaaugauuu

SEQ ID NO: 825007 - RNA, 20 nt, Artificial Sequence
  Synthetic
ugauaauuuaaacaugauuu

SEQ ID NO: 825008 - RNA, 20 nt, Artificial Sequence
  Synthetic
caguuacaccagcaugauuu

SEQ ID NO: 825009 - RNA, 20 nt, Artificial Sequence
  Synthetic
caaaucacauggcaugauuu

SEQ ID NO: 825010 - RNA, 20 nt, Artificial Sequence
  Synthetic
auuuucucauuugaugauuu

SEQ ID NO: 825011 - RNA, 20 nt, Artificial Sequence
  Synthetic
auuuuucuuagauaugauuu

SEQ ID NO: 825012 - RNA, 20 nt, Artificial Sequence
  Synthetic
uuagauaaugacuaugauuu

SEQ ID NO: 825013 - RNA, 20 nt, Artificial Sequence
  Synthetic
cccuuuuuccuuuaugauuu

SEQ ID NO: 825014 - RNA, 20 nt, Artificial Sequence
  Synthetic
auuuauuagcuuuaugauuu

SEQ ID NO: 825015 - RNA, 20 nt, Artificial Sequence
  Synthetic
cuaauuaacuuuuaugauuu

SEQ ID NO: 825016 - RNA, 20 nt, Artificial Sequence
  Synthetic
aacuaauauuuuuaugauuu

SEQ ID NO: 825017 - RNA, 20 nt, Artificial Sequence
  Synthetic
agaucugauucaacugauuu

SEQ ID NO: 825018 - RNA, 20 nt, Artificial Sequence
  Synthetic
aaugaggggaaugcugauuu

SEQ ID NO: 825019 - RNA, 20 nt, Artificial Sequence
  Synthetic
auauuggacauugcugauuu

SEQ ID NO: 825020 - RNA, 20 nt, Artificial Sequence
  Synthetic
auauuuaggugcucugauuu

SEQ ID NO: 825021 - RNA, 20 nt, Artificial Sequence
  Synthetic
uaaauaauuuauucugauuu

SEQ ID NO: 825022 - RNA, 20 nt, Artificial Sequence
  Synthetic
uucaaaagaaacagugauuu

SEQ ID NO: 825023 - RNA, 20 nt, Artificial Sequence
  Synthetic
uccuggggguggggugauuu

SEQ ID NO: 825024 - RNA, 20 nt, Artificial Sequence
  Synthetic
uguuaacaccauggugauuu

SEQ ID NO: 825025 - RNA, 20 nt, Artificial Sequence
  Synthetic
uucacuaaauaaugugauuu

SEQ ID NO: 825026 - RNA, 20 nt, Artificial Sequence
  Synthetic
uucauuccuugacuugauuu

SEQ ID NO: 825027 - RNA, 20 nt, Artificial Sequence
  Synthetic
uuaugucucagucuugauuu

SEQ ID NO: 825028 - RNA, 20 nt, Artificial Sequence
  Synthetic
aauguauauucuguugauuu

SEQ ID NO: 825029 - RNA, 20 nt, Artificial Sequence
  Synthetic
uucacuuuggcauuugauuu

SEQ ID NO: 825030 - RNA, 20 nt, Artificial Sequence
  Synthetic
uuaauuccccccuuugauuu

SEQ ID NO: 825031 - RNA, 20 nt, Artificial Sequence
  Synthetic
uaaucauuucuuuuugauuu

SEQ ID NO: 825032 - RNA, 20 nt, Artificial Sequence
  Synthetic
uaaaauauauaaaaauauuu

SEQ ID NO: 825033 - RNA, 20 nt, Artificial Sequence
  Synthetic
auuuuuauaagaaaauauuu

SEQ ID NO: 825034 - RNA, 20 nt, Artificial Sequence
  Synthetic
uuugccacaugaaaauauuu

SEQ ID NO: 825035 - RNA, 20 nt, Artificial Sequence
  Synthetic
acacgacugauaaaauauuu

SEQ ID NO: 825036 - RNA, 20 nt, Artificial Sequence
  Synthetic
auggaugaauuaaaauauuu

SEQ ID NO: 825037 - RNA, 20 nt, Artificial Sequence
  Synthetic
acuaacccuuuaaaauauuu

SEQ ID NO: 825038 - RNA, 20 nt, Artificial Sequence
  Synthetic
acuuaaaaaugcaaauauuu

SEQ ID NO: 825039 - RNA, 20 nt, Artificial Sequence
  Synthetic
agcugaaccaagaaauauuu

SEQ ID NO: 825040 - RNA, 20 nt, Artificial Sequence
  Synthetic
uauugggugcauaaauauuu

SEQ ID NO: 825041 - RNA, 20 nt, Artificial Sequence
  Synthetic
ucaaggagaccuaaauauuu

SEQ ID NO: 825042 - RNA, 20 nt, Artificial Sequence
  Synthetic
uucuuacucucuaaauauuu

SEQ ID NO: 825043 - RNA, 20 nt, Artificial Sequence
  Synthetic
cuucaguuaaguaaauauuu

SEQ ID NO: 825044 - RNA, 20 nt, Artificial Sequence
  Synthetic
aagccagauaguaaauauuu

SEQ ID NO: 825045 - RNA, 20 nt, Artificial Sequence
  Synthetic
ucauccuaugaagaauauuu

SEQ ID NO: 825046 - RNA, 20 nt, Artificial Sequence
  Synthetic
ugucagagaggagaauauuu

SEQ ID NO: 825047 - RNA, 20 nt, Artificial Sequence
  Synthetic
aagcaggguguagaauauuu

SEQ ID NO: 825048 - RNA, 20 nt, Artificial Sequence
  Synthetic
uuuccugaauaggaauauuu

SEQ ID NO: 825049 - RNA, 20 nt, Artificial Sequence
  Synthetic
aucuagguauccuaauauuu

SEQ ID NO: 825050 - RNA, 20 nt, Artificial Sequence
  Synthetic
cagugaugacuguaauauuu

SEQ ID NO: 825051 - RNA, 20 nt, Artificial Sequence
  Synthetic
aucauaauccaaacauauuu

SEQ ID NO: 825052 - RNA, 20 nt, Artificial Sequence
  Synthetic
aagaaaguauaaacauauuu

SEQ ID NO: 825053 - RNA, 20 nt, Artificial Sequence
  Synthetic
ccauuagaaugaacauauuu

SEQ ID NO: 825054 - RNA, 20 nt, Artificial Sequence
  Synthetic
cuuguaggcagcacauauuu

SEQ ID NO: 825055 - RNA, 20 nt, Artificial Sequence
  Synthetic
agauacgcauguacauauuu

SEQ ID NO: 825056 - RNA, 20 nt, Artificial Sequence
  Synthetic
aauuauccauuuacauauuu

SEQ ID NO: 825057 - RNA, 20 nt, Artificial Sequence
  Synthetic
ucuacacaauaaccauauuu

SEQ ID NO: 825058 - RNA, 20 nt, Artificial Sequence
  Synthetic
uaugucaaagugccauauuu

SEQ ID NO: 825059 - RNA, 20 nt, Artificial Sequence
  Synthetic
agaaugaagaguccauauuu

SEQ ID NO: 825060 - RNA, 20 nt, Artificial Sequence
  Synthetic
uacucaaguuuuccauauuu

SEQ ID NO: 825061 - RNA, 20 nt, Artificial Sequence
  Synthetic
aagaaugauaaagcauauuu

SEQ ID NO: 825062 - RNA, 20 nt, Artificial Sequence
  Synthetic
cuagugacaugagcauauuu

SEQ ID NO: 825063 - RNA, 20 nt, Artificial Sequence
  Synthetic
caaaagucaagggcauauuu

SEQ ID NO: 825064 - RNA, 20 nt, Artificial Sequence
  Synthetic
auauaugugauggcauauuu

SEQ ID NO: 825065 - RNA, 20 nt, Artificial Sequence
  Synthetic
uauccuaugcagucauauuu

SEQ ID NO: 825066 - RNA, 20 nt, Artificial Sequence
  Synthetic
caguaauugaugucauauuu

SEQ ID NO: 825067 - RNA, 20 nt, Artificial Sequence
  Synthetic
uauaauugcauuucauauuu

SEQ ID NO: 825068 - RNA, 20 nt, Artificial Sequence
  Synthetic
ucuuguaaacuuucauauuu

SEQ ID NO: 825069 - RNA, 20 nt, Artificial Sequence
  Synthetic
cuuuuucuacuuucauauuu

SEQ ID NO: 825070 - RNA, 20 nt, Artificial Sequence
  Synthetic
agagauagaaaaagauauuu

SEQ ID NO: 825071 - RNA, 20 nt, Artificial Sequence
  Synthetic
uuuaaugauaucagauauuu

SEQ ID NO: 825072 - RNA, 20 nt, Artificial Sequence
  Synthetic
cauugaaacaagagauauuu

SEQ ID NO: 825073 - RNA, 20 nt, Artificial Sequence
  Synthetic
uggaauggcaguagauauuu

SEQ ID NO: 825074 - RNA, 20 nt, Artificial Sequence
  Synthetic
aaacuacacauccgauauuu

SEQ ID NO: 825075 - RNA, 20 nt, Artificial Sequence
  Synthetic
cuucuggucaugggauauuu

SEQ ID NO: 825076 - RNA, 20 nt, Artificial Sequence
  Synthetic
aauuuuauagauggauauuu

SEQ ID NO: 825077 - RNA, 20 nt, Artificial Sequence
  Synthetic
uauuuucaaaaaugauauuu

SEQ ID NO: 825078 - RNA, 20 nt, Artificial Sequence
  Synthetic
uccauauaauggugauauuu

SEQ ID NO: 825079 - RNA, 20 nt, Artificial Sequence
  Synthetic
uaggcucaauaaauauauuu

SEQ ID NO: 825080 - RNA, 20 nt, Artificial Sequence
  Synthetic
aucaaaagguacauauauuu

SEQ ID NO: 825081 - RNA, 20 nt, Artificial Sequence
  Synthetic
uuuuguugucucauauauuu

SEQ ID NO: 825082 - RNA, 20 nt, Artificial Sequence
  Synthetic
uaaauuaauaggauauauuu

SEQ ID NO: 825083 - RNA, 20 nt, Artificial Sequence
  Synthetic
uuuauagccaugauauauuu

SEQ ID NO: 825084 - RNA, 20 nt, Artificial Sequence
  Synthetic
uauugggugcauauauauuu

SEQ ID NO: 825085 - RNA, 20 nt, Artificial Sequence
  Synthetic
auuaaguccccuauauauuu

SEQ ID NO: 825086 - RNA, 20 nt, Artificial Sequence
  Synthetic
uauauuugcuuuauauauuu

SEQ ID NO: 825087 - RNA, 20 nt, Artificial Sequence
  Synthetic
aauguuugcuuuauauauuu

SEQ ID NO: 825088 - RNA, 20 nt, Artificial Sequence
  Synthetic
auuaauaugacacuauauuu

SEQ ID NO: 825089 - RNA, 20 nt, Artificial Sequence
  Synthetic
ccauucaauacgcuauauuu

SEQ ID NO: 825090 - RNA, 20 nt, Artificial Sequence
  Synthetic
aaaacaauuuuaguauauuu

SEQ ID NO: 825091 - RNA, 20 nt, Artificial Sequence
  Synthetic
uuccaagagcauguauauuu

SEQ ID NO: 825092 - RNA, 20 nt, Artificial Sequence
  Synthetic
cuugaguuccuuguauauuu

SEQ ID NO: 825093 - RNA, 20 nt, Artificial Sequence
  Synthetic
uuaacacaguaauuauauuu

SEQ ID NO: 825094 - RNA, 20 nt, Artificial Sequence
  Synthetic
cuugaauuucuguuauauuu

SEQ ID NO: 825095 - RNA, 20 nt, Artificial Sequence
  Synthetic
uacauuuauaauuuauauuu

SEQ ID NO: 825096 - RNA, 20 nt, Artificial Sequence
  Synthetic
auuuucauuuauuuauauuu

SEQ ID NO: 825097 - RNA, 20 nt, Artificial Sequence
  Synthetic
uuguuuuuuuuuuuauauuu

SEQ ID NO: 825098 - RNA, 20 nt, Artificial Sequence
  Synthetic
cgcagaauauaaaacuauuu

SEQ ID NO: 825099 - RNA, 20 nt, Artificial Sequence
  Synthetic
uugaugacaguaaacuauuu

SEQ ID NO: 825100 - RNA, 20 nt, Artificial Sequence
  Synthetic
ccaagaaaccagaacuauuu

SEQ ID NO: 825101 - RNA, 20 nt, Artificial Sequence
  Synthetic
uacauuugauagaacuauuu

SEQ ID NO: 825102 - RNA, 20 nt, Artificial Sequence
  Synthetic
aaauauuacaugaacuauuu

SEQ ID NO: 825103 - RNA, 20 nt, Artificial Sequence
  Synthetic
auucucucauaucacuauuu

SEQ ID NO: 825104 - RNA, 20 nt, Artificial Sequence
  Synthetic
aaaugugacagagacuauuu

SEQ ID NO: 825105 - RNA, 20 nt, Artificial Sequence
  Synthetic
aacccaaauuuugacuauuu

SEQ ID NO: 825106 - RNA, 20 nt, Artificial Sequence
  Synthetic
auaucgguuucuuacuauuu

SEQ ID NO: 825107 - RNA, 20 nt, Artificial Sequence
  Synthetic
aacauuugcugaaccuauuu

SEQ ID NO: 825108 - RNA, 20 nt, Artificial Sequence
  Synthetic
uaaaauucccucaccuauuu

SEQ ID NO: 825109 - RNA, 20 nt, Artificial Sequence
  Synthetic
uuugcacuugucuccuauuu

SEQ ID NO: 825110 - RNA, 20 nt, Artificial Sequence
  Synthetic
acugauguuuugagcuauuu

SEQ ID NO: 825111 - RNA, 20 nt, Artificial Sequence
  Synthetic
augcguuaaaauagcuauuu

SEQ ID NO: 825112 - RNA, 20 nt, Artificial Sequence
  Synthetic
cuuaauuaagcacucuauuu

SEQ ID NO: 825113 - RNA, 20 nt, Artificial Sequence
  Synthetic
agcaugcaguaugucuauuu

SEQ ID NO: 825114 - RNA, 20 nt, Artificial Sequence
  Synthetic
uuuuccaagauugucuauuu

SEQ ID NO: 825115 - RNA, 20 nt, Artificial Sequence
  Synthetic
auccaggucucauucuauuu

SEQ ID NO: 825116 - RNA, 20 nt, Artificial Sequence
  Synthetic
aaaagcaguuuauucuauuu

SEQ ID NO: 825117 - RNA, 20 nt, Artificial Sequence
  Synthetic
ucuucguguuuauucuauuu

SEQ ID NO: 825118 - RNA, 20 nt, Artificial Sequence
  Synthetic
uucucuccucacuucuauuu

SEQ ID NO: 825119 - RNA, 20 nt, Artificial Sequence
  Synthetic
aaaaauaauaucuucuauuu

SEQ ID NO: 825120 - RNA, 20 nt, Artificial Sequence
  Synthetic
agcuaguuuuauuucuauuu

SEQ ID NO: 825121 - RNA, 20 nt, Artificial Sequence
  Synthetic
caaaacagcccuuucuauuu

SEQ ID NO: 825122 - RNA, 20 nt, Artificial Sequence
  Synthetic
uaaacaugaacaaaguauuu

SEQ ID NO: 825123 - RNA, 20 nt, Artificial Sequence
  Synthetic
acuuucagucgcaaguauuu

SEQ ID NO: 825124 - RNA, 20 nt, Artificial Sequence
  Synthetic
cuuacagaacuccaguauuu

SEQ ID NO: 825125 - RNA, 20 nt, Artificial Sequence
  Synthetic
auauauaaagagcaguauuu

SEQ ID NO: 825126 - RNA, 20 nt, Artificial Sequence
  Synthetic
cagggagggcaggaguauuu

SEQ ID NO: 825127 - RNA, 20 nt, Artificial Sequence
  Synthetic
agcuaugcaguggaguauuu

SEQ ID NO: 825128 - RNA, 20 nt, Artificial Sequence
  Synthetic
uauuuuuuguuguaguauuu

SEQ ID NO: 825129 - RNA, 20 nt, Artificial Sequence
  Synthetic
ugcguuuauaauuaguauuu

SEQ ID NO: 825130 - RNA, 20 nt, Artificial Sequence
  Synthetic
ucacaauagaguuaguauuu

SEQ ID NO: 825131 - RNA, 20 nt, Artificial Sequence
  Synthetic
ugaacaauucaaucguauuu

SEQ ID NO: 825132 - RNA, 20 nt, Artificial Sequence
  Synthetic
aaguugugcugaagguauuu

SEQ ID NO: 825133 - RNA, 20 nt, Artificial Sequence
  Synthetic
cgauguuuuacuagguauuu

SEQ ID NO: 825134 - RNA, 20 nt, Artificial Sequence
  Synthetic
aaaaagggguuuagguauuu

SEQ ID NO: 825135 - RNA, 20 nt, Artificial Sequence
  Synthetic
ccuucaguagcuugguauuu

SEQ ID NO: 825136 - RNA, 20 nt, Artificial Sequence
  Synthetic
ugaagcuaaaaaauguauuu

SEQ ID NO: 825137 - RNA, 20 nt, Artificial Sequence
  Synthetic
uuauacagccugauguauuu

SEQ ID NO: 825138 - RNA, 20 nt, Artificial Sequence
  Synthetic
aauauauuuuugauguauuu

SEQ ID NO: 825139 - RNA, 20 nt, Artificial Sequence
  Synthetic
aucugaaugucuauguauuu

SEQ ID NO: 825140 - RNA, 20 nt, Artificial Sequence
  Synthetic
auuuuuucauugcuguauuu

SEQ ID NO: 825141 - RNA, 20 nt, Artificial Sequence
  Synthetic
cauaugaaucaucuguauuu

SEQ ID NO: 825142 - RNA, 20 nt, Artificial Sequence
  Synthetic
uguaaaguauuucuguauuu

SEQ ID NO: 825143 - RNA, 20 nt, Artificial Sequence
  Synthetic
uauguagaggauguguauuu

SEQ ID NO: 825144 - RNA, 20 nt, Artificial Sequence
  Synthetic
cuuuggggcaguguguauuu

SEQ ID NO: 825145 - RNA, 20 nt, Artificial Sequence
  Synthetic
ucuauaguuugauuguauuu

SEQ ID NO: 825146 - RNA, 20 nt, Artificial Sequence
  Synthetic
aucagauuccauuuguauuu

SEQ ID NO: 825147 - RNA, 20 nt, Artificial Sequence
  Synthetic
ugauuuaugguuuuguauuu

SEQ ID NO: 825148 - RNA, 20 nt, Artificial Sequence
  Synthetic
aaauugcaaaacaauuauuu

SEQ ID NO: 825149 - RNA, 20 nt, Artificial Sequence
  Synthetic
auaccuguuuucaauuauuu

SEQ ID NO: 825150 - RNA, 20 nt, Artificial Sequence
  Synthetic
cccuccacaaggaauuauuu

SEQ ID NO: 825151 - RNA, 20 nt, Artificial Sequence
  Synthetic
aauauguuauggaauuauuu

SEQ ID NO: 825152 - RNA, 20 nt, Artificial Sequence
  Synthetic
cgacacaugcugaauuauuu

SEQ ID NO: 825153 - RNA, 20 nt, Artificial Sequence
  Synthetic
auaauuucauugaauuauuu

SEQ ID NO: 825154 - RNA, 20 nt, Artificial Sequence
  Synthetic
uauuacuaaaauaauuauuu

SEQ ID NO: 825155 - RNA, 20 nt, Artificial Sequence
  Synthetic
uucaauuauuaacauuauuu

SEQ ID NO: 825156 - RNA, 20 nt, Artificial Sequence
  Synthetic
aaaaccugaagccauuauuu

SEQ ID NO: 825157 - RNA, 20 nt, Artificial Sequence
  Synthetic
caucuauaaauucauuauuu

SEQ ID NO: 825158 - RNA, 20 nt, Artificial Sequence
  Synthetic
cauuuguuuaaugauuauuu

SEQ ID NO: 825159 - RNA, 20 nt, Artificial Sequence
  Synthetic
augagugucugugauuauuu

SEQ ID NO: 825160 - RNA, 20 nt, Artificial Sequence
  Synthetic
ccuggcaaaauauauuauuu

SEQ ID NO: 825161 - RNA, 20 nt, Artificial Sequence
  Synthetic
uuuuuauuugaguauuauuu

SEQ ID NO: 825162 - RNA, 20 nt, Artificial Sequence
  Synthetic
cagcaaugguuuuauuauuu

SEQ ID NO: 825163 - RNA, 20 nt, Artificial Sequence
  Synthetic
aagaugaaacagacuuauuu

SEQ ID NO: 825164 - RNA, 20 nt, Artificial Sequence
  Synthetic
uuacuacacuggacuuauuu

SEQ ID NO: 825165 - RNA, 20 nt, Artificial Sequence
  Synthetic
auuucugauuuuacuuauuu

SEQ ID NO: 825166 - RNA, 20 nt, Artificial Sequence
  Synthetic
ucaacaugauguccuuauuu

SEQ ID NO: 825167 - RNA, 20 nt, Artificial Sequence
  Synthetic
uucucaauuuaugcuuauuu

SEQ ID NO: 825168 - RNA, 20 nt, Artificial Sequence
  Synthetic
uauaagaugauaucuuauuu

SEQ ID NO: 825169 - RNA, 20 nt, Artificial Sequence
  Synthetic
uucaauucuaucucuuauuu

SEQ ID NO: 825170 - RNA, 20 nt, Artificial Sequence
  Synthetic
uggguagcuuucucuuauuu

SEQ ID NO: 825171 - RNA, 20 nt, Artificial Sequence
  Synthetic
ucuuaugcuuagucuuauuu

SEQ ID NO: 825172 - RNA, 20 nt, Artificial Sequence
  Synthetic
agaauuguuaggaguuauuu

SEQ ID NO: 825173 - RNA, 20 nt, Artificial Sequence
  Synthetic
uuuaaacucuuuaguuauuu

SEQ ID NO: 825174 - RNA, 20 nt, Artificial Sequence
  Synthetic
ccuaugugaggagguuauuu

SEQ ID NO: 825175 - RNA, 20 nt, Artificial Sequence
  Synthetic
aacaugaucacauguuauuu

SEQ ID NO: 825176 - RNA, 20 nt, Artificial Sequence
  Synthetic
ucaaaauuaaccuguuauuu

SEQ ID NO: 825177 - RNA, 20 nt, Artificial Sequence
  Synthetic
uaacccuaagccuguuauuu

SEQ ID NO: 825178 - RNA, 20 nt, Artificial Sequence
  Synthetic
aggucccaucauuguuauuu

SEQ ID NO: 825179 - RNA, 20 nt, Artificial Sequence
  Synthetic
uugaaggugaaaauuuauuu

SEQ ID NO: 825180 - RNA, 20 nt, Artificial Sequence
  Synthetic
uacuuuuuggaaauuuauuu

SEQ ID NO: 825181 - RNA, 20 nt, Artificial Sequence
  Synthetic
uaucacugagacauuuauuu

SEQ ID NO: 825182 - RNA, 20 nt, Artificial Sequence
  Synthetic
uguagauuauacauuuauuu

SEQ ID NO: 825183 - RNA, 20 nt, Artificial Sequence
  Synthetic
caaacauuuaccauuuauuu

SEQ ID NO: 825184 - RNA, 20 nt, Artificial Sequence
  Synthetic
acuuacugucucauuuauuu

SEQ ID NO: 825185 - RNA, 20 nt, Artificial Sequence
  Synthetic
ucaagauuugucauuuauuu

SEQ ID NO: 825186 - RNA, 20 nt, Artificial Sequence
  Synthetic
uaagagcaagugauuuauuu

SEQ ID NO: 825187 - RNA, 20 nt, Artificial Sequence
  Synthetic
caauaacuugauauuuauuu

SEQ ID NO: 825188 - RNA, 20 nt, Artificial Sequence
  Synthetic
aaguguaauuauauuuauuu

SEQ ID NO: 825189 - RNA, 20 nt, Artificial Sequence
  Synthetic
uuaauaaaaucuauuuauuu

SEQ ID NO: 825190 - RNA, 20 nt, Artificial Sequence
  Synthetic
ugacaauuauguauuuauuu

SEQ ID NO: 825191 - RNA, 20 nt, Artificial Sequence
  Synthetic
uauuauuuauuuauuuauuu

SEQ ID NO: 825192 - RNA, 20 nt, Artificial Sequence
  Synthetic
acagccaugucccuuuauuu

SEQ ID NO: 825193 - RNA, 20 nt, Artificial Sequence
  Synthetic
aaaaaaaaaaaaguuuauuu

SEQ ID NO: 825194 - RNA, 20 nt, Artificial Sequence
  Synthetic
ugcaguauuaaaguuuauuu

SEQ ID NO: 825195 - RNA, 20 nt, Artificial Sequence
  Synthetic
uaagagggagucguuuauuu

SEQ ID NO: 825196 - RNA, 20 nt, Artificial Sequence
  Synthetic
ugaacucaguggguuuauuu

SEQ ID NO: 825197 - RNA, 20 nt, Artificial Sequence
  Synthetic
aaaaccccuacuguuuauuu

SEQ ID NO: 825198 - RNA, 20 nt, Artificial Sequence
  Synthetic
auuuauauauuuguuuauuu

SEQ ID NO: 825199 - RNA, 20 nt, Artificial Sequence
  Synthetic
caagccuugggauuuuauuu

SEQ ID NO: 825200 - RNA, 20 nt, Artificial Sequence
  Synthetic
aaacagcaaauguuuuauuu

SEQ ID NO: 825201 - RNA, 20 nt, Artificial Sequence
  Synthetic
uuuuaauuguuguuuuauuu

SEQ ID NO: 825202 - RNA, 20 nt, Artificial Sequence
  Synthetic
uaaagcaauuuguuuuauuu

SEQ ID NO: 825203 - RNA, 20 nt, Artificial Sequence
  Synthetic
uacacauaacauuuuuauuu

SEQ ID NO: 825204 - RNA, 20 nt, Artificial Sequence
  Synthetic
aauuguuuuuaacaaacuuu

SEQ ID NO: 825205 - RNA, 20 nt, Artificial Sequence
  Synthetic
agggggcaugagcaaacuuu

SEQ ID NO: 825206 - RNA, 20 nt, Artificial Sequence
  Synthetic
auucuaaagucagaaacuuu

SEQ ID NO: 825207 - RNA, 20 nt, Artificial Sequence
  Synthetic
uuuuccaggcuagaaacuuu

SEQ ID NO: 825208 - RNA, 20 nt, Artificial Sequence
  Synthetic
auaaggugagaggaaacuuu

SEQ ID NO: 825209 - RNA, 20 nt, Artificial Sequence
  Synthetic
uuccucaauguugaaacuuu

SEQ ID NO: 825210 - RNA, 20 nt, Artificial Sequence
  Synthetic
uaccaaaauggauaaacuuu

SEQ ID NO: 825211 - RNA, 20 nt, Artificial Sequence
  Synthetic
aaaggcagguccuaaacuuu

SEQ ID NO: 825212 - RNA, 20 nt, Artificial Sequence
  Synthetic
uucaccugcuauuaaacuuu

SEQ ID NO: 825213 - RNA, 20 nt, Artificial Sequence
  Synthetic
aguuaaaaaaacacaacuuu

SEQ ID NO: 825214 - RNA, 20 nt, Artificial Sequence
  Synthetic
aauuaaaacuucccaacuuu

SEQ ID NO: 825215 - RNA, 20 nt, Artificial Sequence
  Synthetic
uggaucauuuugccaacuuu

SEQ ID NO: 825216 - RNA, 20 nt, Artificial Sequence
  Synthetic
aaaacaaaacaagcaacuuu

SEQ ID NO: 825217 - RNA, 20 nt, Artificial Sequence
  Synthetic
ccaaucaagacugcaacuuu

SEQ ID NO: 825218 - RNA, 20 nt, Artificial Sequence
  Synthetic
cuuagugauuuuucaacuuu

SEQ ID NO: 825219 - RNA, 20 nt, Artificial Sequence
  Synthetic
cuauaauuguacagaacuuu

SEQ ID NO: 825220 - RNA, 20 nt, Artificial Sequence
  Synthetic
cugaauugcuacugaacuuu

SEQ ID NO: 825221 - RNA, 20 nt, Artificial Sequence
  Synthetic
aaccaauaacaaauaacuuu

SEQ ID NO: 825222 - RNA, 20 nt, Artificial Sequence
  Synthetic
uuccauuucaccauaacuuu

SEQ ID NO: 825223 - RNA, 20 nt, Artificial Sequence
  Synthetic
ucuuucagugucauaacuuu

SEQ ID NO: 825224 - RNA, 20 nt, Artificial Sequence
  Synthetic
aaaauuauccagauaacuuu

SEQ ID NO: 825225 - RNA, 20 nt, Artificial Sequence
  Synthetic
uucuagaaauauauaacuuu

SEQ ID NO: 825226 - RNA, 20 nt, Artificial Sequence
  Synthetic
auaauucugauuauaacuuu

SEQ ID NO: 825227 - RNA, 20 nt, Artificial Sequence
  Synthetic
agggcuuguuaccuaacuuu

SEQ ID NO: 825228 - RNA, 20 nt, Artificial Sequence
  Synthetic
uccuucccucugcuaacuuu

SEQ ID NO: 825229 - RNA, 20 nt, Artificial Sequence
  Synthetic
uucuucuuucugcuaacuuu

SEQ ID NO: 825230 - RNA, 20 nt, Artificial Sequence
  Synthetic
auuuuaaaacuuguaacuuu

SEQ ID NO: 825231 - RNA, 20 nt, Artificial Sequence
  Synthetic
accuauaaucccaacacuuu

SEQ ID NO: 825232 - RNA, 20 nt, Artificial Sequence
  Synthetic
accuguaaucucaacacuuu

SEQ ID NO: 825233 - RNA, 20 nt, Artificial Sequence
  Synthetic
accuguaauccuaacacuuu

SEQ ID NO: 825234 - RNA, 20 nt, Artificial Sequence
  Synthetic
uaguccuaccaucacacuuu

SEQ ID NO: 825235 - RNA, 20 nt, Artificial Sequence
  Synthetic
ucauguccuucgcccacuuu

SEQ ID NO: 825236 - RNA, 20 nt, Artificial Sequence
  Synthetic
ucagugcuguaauccacuuu

SEQ ID NO: 825237 - RNA, 20 nt, Artificial Sequence
  Synthetic
augaacuuggcuuccacuuu

SEQ ID NO: 825238 - RNA, 20 nt, Artificial Sequence
  Synthetic
aacugaaaucccagcacuuu

SEQ ID NO: 825239 - RNA, 20 nt, Artificial Sequence
  Synthetic
ccuguaaaucccagcacuuu

SEQ ID NO: 825240 - RNA, 20 nt, Artificial Sequence
  Synthetic
ccccauaaucccagcacuuu

SEQ ID NO: 825241 - RNA, 20 nt, Artificial Sequence
  Synthetic
accuauaaucccagcacuuu

SEQ ID NO: 825242 - RNA, 20 nt, Artificial Sequence
  Synthetic
uccuauaaucccagcacuuu

SEQ ID NO: 825243 - RNA, 20 nt, Artificial Sequence
  Synthetic
accaguaaucccagcacuuu

SEQ ID NO: 825244 - RNA, 20 nt, Artificial Sequence
  Synthetic
accuguaaucccagcacuuu

SEQ ID NO: 825245 - RNA, 20 nt, Artificial Sequence
  Synthetic
gccuguaaucccagcacuuu

SEQ ID NO: 825246 - RNA, 20 nt, Artificial Sequence
  Synthetic
cgccuguaucccagcacuuu

SEQ ID NO: 825247 - RNA, 20 nt, Artificial Sequence
  Synthetic
accuguacucccagcacuuu

SEQ ID NO: 825248 - RNA, 20 nt, Artificial Sequence
  Synthetic
uccuguaauuccagcacuuu

SEQ ID NO: 825249 - RNA, 20 nt, Artificial Sequence
  Synthetic
uugucuaguuuuagcacuuu

SEQ ID NO: 825250 - RNA, 20 nt, Artificial Sequence
  Synthetic
accuguaauccccgcacuuu

SEQ ID NO: 825251 - RNA, 20 nt, Artificial Sequence
  Synthetic
agagggaaucuuugcacuuu

SEQ ID NO: 825252 - RNA, 20 nt, Artificial Sequence
  Synthetic
aucaguaugcuaaucacuuu

SEQ ID NO: 825253 - RNA, 20 nt, Artificial Sequence
  Synthetic
accauucuuaccaucacuuu

SEQ ID NO: 825254 - RNA, 20 nt, Artificial Sequence
  Synthetic
cgagguagguggaucacuuu

SEQ ID NO: 825255 - RNA, 20 nt, Artificial Sequence
  Synthetic
uaaauguaguuuaucacuuu

SEQ ID NO: 825256 - RNA, 20 nt, Artificial Sequence
  Synthetic
uacauuucuuuuaucacuuu

SEQ ID NO: 825257 - RNA, 20 nt, Artificial Sequence
  Synthetic
uaaaagaugucccucacuuu

SEQ ID NO: 825258 - RNA, 20 nt, Artificial Sequence
  Synthetic
auuuauauuuuccucacuuu

SEQ ID NO: 825259 - RNA, 20 nt, Artificial Sequence
  Synthetic
ugacucaauaaucucacuuu

SEQ ID NO: 825260 - RNA, 20 nt, Artificial Sequence
  Synthetic
aaauuaucagaucucacuuu

SEQ ID NO: 825261 - RNA, 20 nt, Artificial Sequence
  Synthetic
ucugauaaauaagucacuuu

SEQ ID NO: 825262 - RNA, 20 nt, Artificial Sequence
  Synthetic
aaugggaaagaggucacuuu

SEQ ID NO: 825263 - RNA, 20 nt, Artificial Sequence
  Synthetic
uguuaauacccugucacuuu

SEQ ID NO: 825264 - RNA, 20 nt, Artificial Sequence
  Synthetic
acuguguaauaauucacuuu

SEQ ID NO: 825265 - RNA, 20 nt, Artificial Sequence
  Synthetic
cuuucuugaugaaagacuuu

SEQ ID NO: 825266 - RNA, 20 nt, Artificial Sequence
  Synthetic
uuggaaugaguuaagacuuu

SEQ ID NO: 825267 - RNA, 20 nt, Artificial Sequence
  Synthetic
aacaauuauuuuaagacuuu

SEQ ID NO: 825268 - RNA, 20 nt, Artificial Sequence
  Synthetic
aaugagaaaacugagacuuu

SEQ ID NO: 825269 - RNA, 20 nt, Artificial Sequence
  Synthetic
augcagaaugcugagacuuu

SEQ ID NO: 825270 - RNA, 20 nt, Artificial Sequence
  Synthetic
aaaaauggucuugagacuuu

SEQ ID NO: 825271 - RNA, 20 nt, Artificial Sequence
  Synthetic
uucccuaauuuugagacuuu

SEQ ID NO: 825272 - RNA, 20 nt, Artificial Sequence
  Synthetic
cugcgucaaagauagacuuu

SEQ ID NO: 825273 - RNA, 20 nt, Artificial Sequence
  Synthetic
cuuuaguuuguuucgacuuu

SEQ ID NO: 825274 - RNA, 20 nt, Artificial Sequence
  Synthetic
cgcuguaaucccaggacuuu

SEQ ID NO: 825275 - RNA, 20 nt, Artificial Sequence
  Synthetic
cauuuuucucuuaggacuuu

SEQ ID NO: 825276 - RNA, 20 nt, Artificial Sequence
  Synthetic
aauguaauacauuggacuuu

SEQ ID NO: 825277 - RNA, 20 nt, Artificial Sequence
  Synthetic
aaacuuuggacuuggacuuu

SEQ ID NO: 825278 - RNA, 20 nt, Artificial Sequence
  Synthetic
agacuuuggacuuggacuuu

SEQ ID NO: 825279 - RNA, 20 nt, Artificial Sequence
  Synthetic
ugaacagugaccaugacuuu

SEQ ID NO: 825280 - RNA, 20 nt, Artificial Sequence
  Synthetic
cauuuugauagcaugacuuu

SEQ ID NO: 825281 - RNA, 20 nt, Artificial Sequence
  Synthetic
auauuugugucuaugacuuu

SEQ ID NO: 825282 - RNA, 20 nt, Artificial Sequence
  Synthetic
acuugggaaaaccugacuuu

SEQ ID NO: 825283 - RNA, 20 nt, Artificial Sequence
  Synthetic
cuucccuucccauugacuuu

SEQ ID NO: 825284 - RNA, 20 nt, Artificial Sequence
  Synthetic
uuuuccuaccccuugacuuu

SEQ ID NO: 825285 - RNA, 20 nt, Artificial Sequence
  Synthetic
ccuuuacccuuaaauacuuu

SEQ ID NO: 825286 - RNA, 20 nt, Artificial Sequence
  Synthetic
agcuagccacauaauacuuu

SEQ ID NO: 825287 - RNA, 20 nt, Artificial Sequence
  Synthetic
auucauuuccauaauacuuu

SEQ ID NO: 825288 - RNA, 20 nt, Artificial Sequence
  Synthetic
agaaugauuuauaauacuuu

SEQ ID NO: 825289 - RNA, 20 nt, Artificial Sequence
  Synthetic
uggccugcagaccauacuuu

SEQ ID NO: 825290 - RNA, 20 nt, Artificial Sequence
  Synthetic
cagucagaggaccauacuuu

SEQ ID NO: 825291 - RNA, 20 nt, Artificial Sequence
  Synthetic
ccaaagccaauggauacuuu

SEQ ID NO: 825292 - RNA, 20 nt, Artificial Sequence
  Synthetic
auacuaaaagaugauacuuu

SEQ ID NO: 825293 - RNA, 20 nt, Artificial Sequence
  Synthetic
aauaaaaugugcuauacuuu

SEQ ID NO: 825294 - RNA, 20 nt, Artificial Sequence
  Synthetic
aaguugucagucuauacuuu

SEQ ID NO: 825295 - RNA, 20 nt, Artificial Sequence
  Synthetic
uuuguguaguaguauacuuu

SEQ ID NO: 825296 - RNA, 20 nt, Artificial Sequence
  Synthetic
aaguaaaucaucacuacuuu

SEQ ID NO: 825297 - RNA, 20 nt, Artificial Sequence
  Synthetic
aagauugccuuggcuacuuu

SEQ ID NO: 825298 - RNA, 20 nt, Artificial Sequence
  Synthetic
caaacuauuucugcuacuuu

SEQ ID NO: 825299 - RNA, 20 nt, Artificial Sequence
  Synthetic
uaaaugauuauugcuacuuu

SEQ ID NO: 825300 - RNA, 20 nt, Artificial Sequence
  Synthetic
aaacauuguacaucuacuuu

SEQ ID NO: 825301 - RNA, 20 nt, Artificial Sequence
  Synthetic
aguugccaagacucuacuuu

SEQ ID NO: 825302 - RNA, 20 nt, Artificial Sequence
  Synthetic
cuuugucaacaaaguacuuu

SEQ ID NO: 825303 - RNA, 20 nt, Artificial Sequence
  Synthetic
accuguaauccuaguacuuu

SEQ ID NO: 825304 - RNA, 20 nt, Artificial Sequence
  Synthetic
uacaauguugaagguacuuu

SEQ ID NO: 825305 - RNA, 20 nt, Artificial Sequence
  Synthetic
auguuagaaccugguacuuu

SEQ ID NO: 825306 - RNA, 20 nt, Artificial Sequence
  Synthetic
ugcugaaaacaauguacuuu

SEQ ID NO: 825307 - RNA, 20 nt, Artificial Sequence
  Synthetic
uauuucaagaauuguacuuu

SEQ ID NO: 825308 - RNA, 20 nt, Artificial Sequence
  Synthetic
uugaaucuauaaauuacuuu

SEQ ID NO: 825309 - RNA, 20 nt, Artificial Sequence
  Synthetic
uuucugcuuuuccuuacuuu

SEQ ID NO: 825310 - RNA, 20 nt, Artificial Sequence
  Synthetic
aaagugacucuaguuacuuu

SEQ ID NO: 825311 - RNA, 20 nt, Artificial Sequence
  Synthetic
uucaagauaaugguuacuuu

SEQ ID NO: 825312 - RNA, 20 nt, Artificial Sequence
  Synthetic
uagaaugauuuauuuacuuu

SEQ ID NO: 825313 - RNA, 20 nt, Artificial Sequence
  Synthetic
aauguuccucaguuuacuuu

SEQ ID NO: 825314 - RNA, 20 nt, Artificial Sequence
  Synthetic
auucagaaaacuuuuacuuu

SEQ ID NO: 825315 - RNA, 20 nt, Artificial Sequence
  Synthetic
ucucuccagagaaaaccuuu

SEQ ID NO: 825316 - RNA, 20 nt, Artificial Sequence
  Synthetic
aguauagaaaagaaaccuuu

SEQ ID NO: 825317 - RNA, 20 nt, Artificial Sequence
  Synthetic
cuagaguccuggaaaccuuu

SEQ ID NO: 825318 - RNA, 20 nt, Artificial Sequence
  Synthetic
uucucccucucuuaaccuuu

SEQ ID NO: 825319 - RNA, 20 nt, Artificial Sequence
  Synthetic
uuaauaccauuuucaccuuu

SEQ ID NO: 825320 - RNA, 20 nt, Artificial Sequence
  Synthetic
cuuuuaauaccaagaccuuu

SEQ ID NO: 825321 - RNA, 20 nt, Artificial Sequence
  Synthetic
ugaucaauuguuagaccuuu

SEQ ID NO: 825322 - RNA, 20 nt, Artificial Sequence
  Synthetic
caacaccauuugcuaccuuu

SEQ ID NO: 825323 - RNA, 20 nt, Artificial Sequence
  Synthetic
acaagugauaagguaccuuu

SEQ ID NO: 825324 - RNA, 20 nt, Artificial Sequence
  Synthetic
aauauuaacuggguaccuuu

SEQ ID NO: 825325 - RNA, 20 nt, Artificial Sequence
  Synthetic
caaacucuggcuguaccuuu

SEQ ID NO: 825326 - RNA, 20 nt, Artificial Sequence
  Synthetic
agggauaaaaaauuaccuuu

SEQ ID NO: 825327 - RNA, 20 nt, Artificial Sequence
  Synthetic
ccucaccaguaaaacccuuu

SEQ ID NO: 825328 - RNA, 20 nt, Artificial Sequence
  Synthetic
ugugguuuuagggacccuuu

SEQ ID NO: 825329 - RNA, 20 nt, Artificial Sequence
  Synthetic
acaguggucccugacccuuu

SEQ ID NO: 825330 - RNA, 20 nt, Artificial Sequence
  Synthetic
aaacaagauacacccccuuu

SEQ ID NO: 825331 - RNA, 20 nt, Artificial Sequence
  Synthetic
ccaaaaaagagcuccccuuu

SEQ ID NO: 825332 - RNA, 20 nt, Artificial Sequence
  Synthetic
ccucuagcucauuccccuuu

SEQ ID NO: 825333 - RNA, 20 nt, Artificial Sequence
  Synthetic
aucauacuuccuuccccuuu

SEQ ID NO: 825334 - RNA, 20 nt, Artificial Sequence
  Synthetic
uucaguuuauaaagcccuuu

SEQ ID NO: 825335 - RNA, 20 nt, Artificial Sequence
  Synthetic
ugccuccuguguugcccuuu

SEQ ID NO: 825336 - RNA, 20 nt, Artificial Sequence
  Synthetic
aaggcauuauccaucccuuu

SEQ ID NO: 825337 - RNA, 20 nt, Artificial Sequence
  Synthetic
uaaauuucaacccucccuuu

SEQ ID NO: 825338 - RNA, 20 nt, Artificial Sequence
  Synthetic
uaagguagcagauucccuuu

SEQ ID NO: 825339 - RNA, 20 nt, Artificial Sequence
  Synthetic
aaaugguaauggaagccuuu

SEQ ID NO: 825340 - RNA, 20 nt, Artificial Sequence
  Synthetic
caaaacuccucaccgccuuu

SEQ ID NO: 825341 - RNA, 20 nt, Artificial Sequence
  Synthetic
cccugaacuuguccgccuuu

SEQ ID NO: 825342 - RNA, 20 nt, Artificial Sequence
  Synthetic
uggauaucaugcaggccuuu

SEQ ID NO: 825343 - RNA, 20 nt, Artificial Sequence
  Synthetic
ccagauuguggagggccuuu

SEQ ID NO: 825344 - RNA, 20 nt, Artificial Sequence
  Synthetic
uauuaggagauggggccuuu

SEQ ID NO: 825345 - RNA, 20 nt, Artificial Sequence
  Synthetic
uuaaugauuugaaugccuuu

SEQ ID NO: 825346 - RNA, 20 nt, Artificial Sequence
  Synthetic
uucuuuuucuuucugccuuu

SEQ ID NO: 825347 - RNA, 20 nt, Artificial Sequence
  Synthetic
caccacucagauuugccuuu

SEQ ID NO: 825348 - RNA, 20 nt, Artificial Sequence
  Synthetic
uuugaugcauauuugccuuu

SEQ ID NO: 825349 - RNA, 20 nt, Artificial Sequence
  Synthetic
aaaacauacauuuugccuuu

SEQ ID NO: 825350 - RNA, 20 nt, Artificial Sequence
  Synthetic
agcaggauuuauaauccuuu

SEQ ID NO: 825351 - RNA, 20 nt, Artificial Sequence
  Synthetic
agaaugauuuauaauccuuu

SEQ ID NO: 825352 - RNA, 20 nt, Artificial Sequence
  Synthetic
agcaugauuuauaauccuuu

SEQ ID NO: 825353 - RNA, 20 nt, Artificial Sequence
  Synthetic
aggaugauuuauaauccuuu

SEQ ID NO: 825354 - RNA, 20 nt, Artificial Sequence
  Synthetic
acuguauucccuaauccuuu

SEQ ID NO: 825355 - RNA, 20 nt, Artificial Sequence
  Synthetic
ccucugugcucuaauccuuu

SEQ ID NO: 825356 - RNA, 20 nt, Artificial Sequence
  Synthetic
acuucauauccucauccuuu

SEQ ID NO: 825357 - RNA, 20 nt, Artificial Sequence
  Synthetic
agagacucaaaauauccuuu

SEQ ID NO: 825358 - RNA, 20 nt, Artificial Sequence
  Synthetic
aauccauuaucaacuccuuu

SEQ ID NO: 825359 - RNA, 20 nt, Artificial Sequence
  Synthetic
ccucccuccccuccuccuuu

SEQ ID NO: 825360 - RNA, 20 nt, Artificial Sequence
  Synthetic
cugaaaauauuaucuccuuu

SEQ ID NO: 825361 - RNA, 20 nt, Artificial Sequence
  Synthetic
uacaaauacaauucuccuuu

SEQ ID NO: 825362 - RNA, 20 nt, Artificial Sequence
  Synthetic
aaauuacugcuuucuccuuu

SEQ ID NO: 825363 - RNA, 20 nt, Artificial Sequence
  Synthetic
aggagaaggcacaguccuuu

SEQ ID NO: 825364 - RNA, 20 nt, Artificial Sequence
  Synthetic
acuaaacacuucaguccuuu

SEQ ID NO: 825365 - RNA, 20 nt, Artificial Sequence
  Synthetic
uuccagcuccagaguccuuu

SEQ ID NO: 825366 - RNA, 20 nt, Artificial Sequence
  Synthetic
agcaugauuuauaguccuuu

SEQ ID NO: 825367 - RNA, 20 nt, Artificial Sequence
  Synthetic
uuaaauaaagaagguccuuu

SEQ ID NO: 825368 - RNA, 20 nt, Artificial Sequence
  Synthetic
uuuacaauuauagguccuuu

SEQ ID NO: 825369 - RNA, 20 nt, Artificial Sequence
  Synthetic
ucuacagaacuagguccuuu

SEQ ID NO: 825370 - RNA, 20 nt, Artificial Sequence
  Synthetic
uucacaaaauaaauuccuuu

SEQ ID NO: 825371 - RNA, 20 nt, Artificial Sequence
  Synthetic
uagaugacaaagauuccuuu

SEQ ID NO: 825372 - RNA, 20 nt, Artificial Sequence
  Synthetic
agaaugauuuauauuccuuu

SEQ ID NO: 825373 - RNA, 20 nt, Artificial Sequence
  Synthetic
agaaugguuuauauuccuuu

SEQ ID NO: 825374 - RNA, 20 nt, Artificial Sequence
  Synthetic
ugccuucaaacacuuccuuu

SEQ ID NO: 825375 - RNA, 20 nt, Artificial Sequence
  Synthetic
aaauucuauuuacuuccuuu

SEQ ID NO: 825376 - RNA, 20 nt, Artificial Sequence
  Synthetic
cagucaagguggcuuccuuu

SEQ ID NO: 825377 - RNA, 20 nt, Artificial Sequence
  Synthetic
auaguuuugaggguuccuuu

SEQ ID NO: 825378 - RNA, 20 nt, Artificial Sequence
  Synthetic
uaguucauccauguuccuuu

SEQ ID NO: 825379 - RNA, 20 nt, Artificial Sequence
  Synthetic
agucugaugggcuuuccuuu

SEQ ID NO: 825380 - RNA, 20 nt, Artificial Sequence
  Synthetic
ugcauugauguguuuccuuu

SEQ ID NO: 825381 - RNA, 20 nt, Artificial Sequence
  Synthetic
cuccuguuugcuuuuccuuu

SEQ ID NO: 825382 - RNA, 20 nt, Artificial Sequence
  Synthetic
ucauuuacauuuuuuccuuu

SEQ ID NO: 825383 - RNA, 20 nt, Artificial Sequence
  Synthetic
uauuaaguggcaaaagcuuu

SEQ ID NO: 825384 - RNA, 20 nt, Artificial Sequence
  Synthetic
uuauuugaaaagaaagcuuu

SEQ ID NO: 825385 - RNA, 20 nt, Artificial Sequence
  Synthetic
auauuuuaaauccaagcuuu

SEQ ID NO: 825386 - RNA, 20 nt, Artificial Sequence
  Synthetic
uuauuuccaaaucaagcuuu

SEQ ID NO: 825387 - RNA, 20 nt, Artificial Sequence
  Synthetic
cacuucuucacagaagcuuu

SEQ ID NO: 825388 - RNA, 20 nt, Artificial Sequence
  Synthetic
uuuaaucacauagaagcuuu

SEQ ID NO: 825389 - RNA, 20 nt, Artificial Sequence
  Synthetic
uuaaacaaugguuaagcuuu

SEQ ID NO: 825390 - RNA, 20 nt, Artificial Sequence
  Synthetic
auuuaaaaugaaacagcuuu

SEQ ID NO: 825391 - RNA, 20 nt, Artificial Sequence
  Synthetic
cuauguacagagucagcuuu

SEQ ID NO: 825392 - RNA, 20 nt, Artificial Sequence
  Synthetic
aaacaucucccaagagcuuu

SEQ ID NO: 825393 - RNA, 20 nt, Artificial Sequence
  Synthetic
aguuugagacccagagcuuu

SEQ ID NO: 825394 - RNA, 20 nt, Artificial Sequence
  Synthetic
uauuaaggggugggagcuuu

SEQ ID NO: 825395 - RNA, 20 nt, Artificial Sequence
  Synthetic
uuuauguuuucaugagcuuu

SEQ ID NO: 825396 - RNA, 20 nt, Artificial Sequence
  Synthetic
aacagcuuaagaugagcuuu

SEQ ID NO: 825397 - RNA, 20 nt, Artificial Sequence
  Synthetic
uccuuucacucuugagcuuu

SEQ ID NO: 825398 - RNA, 20 nt, Artificial Sequence
  Synthetic
cuugauagcagaauagcuuu

SEQ ID NO: 825399 - RNA, 20 nt, Artificial Sequence
  Synthetic
aauaaagaagguguagcuuu

SEQ ID NO: 825400 - RNA, 20 nt, Artificial Sequence
  Synthetic
ucccaggucuguguagcuuu

SEQ ID NO: 825401 - RNA, 20 nt, Artificial Sequence
  Synthetic
uuccauguccucuuagcuuu

SEQ ID NO: 825402 - RNA, 20 nt, Artificial Sequence
  Synthetic
uuuucaaucaaauacgcuuu

SEQ ID NO: 825403 - RNA, 20 nt, Artificial Sequence
  Synthetic
accuguaauuccagcgcuuu

SEQ ID NO: 825404 - RNA, 20 nt, Artificial Sequence
  Synthetic
uguguuugagcaaaggcuuu

SEQ ID NO: 825405 - RNA, 20 nt, Artificial Sequence
  Synthetic
aucucugaauagaaggcuuu

SEQ ID NO: 825406 - RNA, 20 nt, Artificial Sequence
  Synthetic
ucuccauccugccaggcuuu

SEQ ID NO: 825407 - RNA, 20 nt, Artificial Sequence
  Synthetic
acaaaggaugaagaggcuuu

SEQ ID NO: 825408 - RNA, 20 nt, Artificial Sequence
  Synthetic
agguuuguucaugaggcuuu

SEQ ID NO: 825409 - RNA, 20 nt, Artificial Sequence
  Synthetic
aauaagaccuaauaggcuuu

SEQ ID NO: 825410 - RNA, 20 nt, Artificial Sequence
  Synthetic
ugaacucauaguuaggcuuu

SEQ ID NO: 825411 - RNA, 20 nt, Artificial Sequence
  Synthetic
cuauauagccucagggcuuu

SEQ ID NO: 825412 - RNA, 20 nt, Artificial Sequence
  Synthetic
aauaagauuuuuggggcuuu

SEQ ID NO: 825413 - RNA, 20 nt, Artificial Sequence
  Synthetic
uucuuaagugugugggcuuu

SEQ ID NO: 825414 - RNA, 20 nt, Artificial Sequence
  Synthetic
cuggaaaaucugauggcuuu

SEQ ID NO: 825415 - RNA, 20 nt, Artificial Sequence
  Synthetic
uacuuguuuggacuggcuuu

SEQ ID NO: 825416 - RNA, 20 nt, Artificial Sequence
  Synthetic
uagugucuuugccuggcuuu

SEQ ID NO: 825417 - RNA, 20 nt, Artificial Sequence
  Synthetic
uccuuuucugcaguggcuuu

SEQ ID NO: 825418 - RNA, 20 nt, Artificial Sequence
  Synthetic
aggguugaacugguggcuuu

SEQ ID NO: 825419 - RNA, 20 nt, Artificial Sequence
  Synthetic
uccucagucccuguggcuuu

SEQ ID NO: 825420 - RNA, 20 nt, Artificial Sequence
  Synthetic
uuuccauaggcauuggcuuu

SEQ ID NO: 825421 - RNA, 20 nt, Artificial Sequence
  Synthetic
aauuaaaagguguuggcuuu

SEQ ID NO: 825422 - RNA, 20 nt, Artificial Sequence
  Synthetic
acugaggcauuaaaugcuuu

SEQ ID NO: 825423 - RNA, 20 nt, Artificial Sequence
  Synthetic
auuuuaaaccacaaugcuuu

SEQ ID NO: 825424 - RNA, 20 nt, Artificial Sequence
  Synthetic
ugaacugaacugaaugcuuu

SEQ ID NO: 825425 - RNA, 20 nt, Artificial Sequence
  Synthetic
aacagcuaauuccaugcuuu

SEQ ID NO: 825426 - RNA, 20 nt, Artificial Sequence
  Synthetic
ucucccauuuuccaugcuuu

SEQ ID NO: 825427 - RNA, 20 nt, Artificial Sequence
  Synthetic
auuuaagcaggucaugcuuu

SEQ ID NO: 825428 - RNA, 20 nt, Artificial Sequence
  Synthetic
agcauaaaaauucaugcuuu

SEQ ID NO: 825429 - RNA, 20 nt, Artificial Sequence
  Synthetic
uuuaauaguuaagaugcuuu

SEQ ID NO: 825430 - RNA, 20 nt, Artificial Sequence
  Synthetic
uaucuaaaaucagaugcuuu

SEQ ID NO: 825431 - RNA, 20 nt, Artificial Sequence
  Synthetic
cagucuuuccuggaugcuuu

SEQ ID NO: 825432 - RNA, 20 nt, Artificial Sequence
  Synthetic
ccaaguuuccuugaugcuuu

SEQ ID NO: 825433 - RNA, 20 nt, Artificial Sequence
  Synthetic
ucaauuuaucuauaugcuuu

SEQ ID NO: 825434 - RNA, 20 nt, Artificial Sequence
  Synthetic
aauauuuauauguaugcuuu

SEQ ID NO: 825435 - RNA, 20 nt, Artificial Sequence
  Synthetic
aauaauugaccuuaugcuuu

SEQ ID NO: 825436 - RNA, 20 nt, Artificial Sequence
  Synthetic
cacagaguggaaacugcuuu

SEQ ID NO: 825437 - RNA, 20 nt, Artificial Sequence
  Synthetic
uuucccucuuucacugcuuu

SEQ ID NO: 825438 - RNA, 20 nt, Artificial Sequence
  Synthetic
aggcuucugacuccugcuuu

SEQ ID NO: 825439 - RNA, 20 nt, Artificial Sequence
  Synthetic
cuucuaaucuuaucugcuuu

SEQ ID NO: 825440 - RNA, 20 nt, Artificial Sequence
  Synthetic
ucauuccaauucucugcuuu

SEQ ID NO: 825441 - RNA, 20 nt, Artificial Sequence
  Synthetic
agagucuacucuucugcuuu

SEQ ID NO: 825442 - RNA, 20 nt, Artificial Sequence
  Synthetic
uccaaaacauuuucugcuuu

SEQ ID NO: 825443 - RNA, 20 nt, Artificial Sequence
  Synthetic
acuuguaaucccagugcuuu

SEQ ID NO: 825444 - RNA, 20 nt, Artificial Sequence
  Synthetic
ucauguucuuugagugcuuu

SEQ ID NO: 825445 - RNA, 20 nt, Artificial Sequence
  Synthetic
aggacauugaguagugcuuu

SEQ ID NO: 825446 - RNA, 20 nt, Artificial Sequence
  Synthetic
aguuuuaaaagaugugcuuu

SEQ ID NO: 825447 - RNA, 20 nt, Artificial Sequence
  Synthetic
auuaaugacuacugugcuuu

SEQ ID NO: 825448 - RNA, 20 nt, Artificial Sequence
  Synthetic
auggaacuaguuauugcuuu

SEQ ID NO: 825449 - RNA, 20 nt, Artificial Sequence
  Synthetic
agugauuugaagcuugcuuu

SEQ ID NO: 825450 - RNA, 20 nt, Artificial Sequence
  Synthetic
uagcuacuccugcuugcuuu

SEQ ID NO: 825451 - RNA, 20 nt, Artificial Sequence
  Synthetic
aguuugcugacucuugcuuu

SEQ ID NO: 825452 - RNA, 20 nt, Artificial Sequence
  Synthetic
cuuaauuaugauguugcuuu

SEQ ID NO: 825453 - RNA, 20 nt, Artificial Sequence
  Synthetic
agucugggucuguuugcuuu

SEQ ID NO: 825454 - RNA, 20 nt, Artificial Sequence
  Synthetic
cauuauuuuuuguuugcuuu

SEQ ID NO: 825455 - RNA, 20 nt, Artificial Sequence
  Synthetic
uuuucgguuacuuuugcuuu

SEQ ID NO: 825456 - RNA, 20 nt, Artificial Sequence
  Synthetic
uuuaguuguauaaaaucuuu

SEQ ID NO: 825457 - RNA, 20 nt, Artificial Sequence
  Synthetic
aauaaaauugacaaaucuuu

SEQ ID NO: 825458 - RNA, 20 nt, Artificial Sequence
  Synthetic
agggagaaggggaaaucuuu

SEQ ID NO: 825459 - RNA, 20 nt, Artificial Sequence
  Synthetic
uaaaacauacugaaaucuuu

SEQ ID NO: 825460 - RNA, 20 nt, Artificial Sequence
  Synthetic
ugguuggggaaacaaucuuu

SEQ ID NO: 825461 - RNA, 20 nt, Artificial Sequence
  Synthetic
agcgcaguggcacaaucuuu

SEQ ID NO: 825462 - RNA, 20 nt, Artificial Sequence
  Synthetic
aucagcuguauccaaucuuu

SEQ ID NO: 825463 - RNA, 20 nt, Artificial Sequence
  Synthetic
uuucuaaugugugaaucuuu

SEQ ID NO: 825464 - RNA, 20 nt, Artificial Sequence
  Synthetic
cuucagacaaaauaaucuuu

SEQ ID NO: 825465 - RNA, 20 nt, Artificial Sequence
  Synthetic
caauugugaugauaaucuuu

SEQ ID NO: 825466 - RNA, 20 nt, Artificial Sequence
  Synthetic
uguaggaaauguuaaucuuu

SEQ ID NO: 825467 - RNA, 20 nt, Artificial Sequence
  Synthetic
cccuugcuugaaacaucuuu

SEQ ID NO: 825468 - RNA, 20 nt, Artificial Sequence
  Synthetic
ucaguuucauuaccaucuuu

SEQ ID NO: 825469 - RNA, 20 nt, Artificial Sequence
  Synthetic
uauucuagacauccaucuuu

SEQ ID NO: 825470 - RNA, 20 nt, Artificial Sequence
  Synthetic
uuugggaaauaugcaucuuu

SEQ ID NO: 825471 - RNA, 20 nt, Artificial Sequence
  Synthetic
cuuggugguucuucaucuuu

SEQ ID NO: 825472 - RNA, 20 nt, Artificial Sequence
  Synthetic
agauaucaccucauaucuuu

SEQ ID NO: 825473 - RNA, 20 nt, Artificial Sequence
  Synthetic
acaaguuauuugcuaucuuu

SEQ ID NO: 825474 - RNA, 20 nt, Artificial Sequence
  Synthetic
agucuuuggauaguaucuuu

SEQ ID NO: 825475 - RNA, 20 nt, Artificial Sequence
  Synthetic
caugaauauuggguaucuuu

SEQ ID NO: 825476 - RNA, 20 nt, Artificial Sequence
  Synthetic
ccacccaccucuguaucuuu

SEQ ID NO: 825477 - RNA, 20 nt, Artificial Sequence
  Synthetic
ucaaaagagugcuuaucuuu

SEQ ID NO: 825478 - RNA, 20 nt, Artificial Sequence
  Synthetic
cagauaaagcucuuaucuuu

SEQ ID NO: 825479 - RNA, 20 nt, Artificial Sequence
  Synthetic
aaaucuuucucaaacucuuu

SEQ ID NO: 825480 - RNA, 20 nt, Artificial Sequence
  Synthetic
uuucuuggcuuccacucuuu

SEQ ID NO: 825481 - RNA, 20 nt, Artificial Sequence
  Synthetic
cccccucugucucacucuuu

SEQ ID NO: 825482 - RNA, 20 nt, Artificial Sequence
  Synthetic
cucacuaagauucacucuuu

SEQ ID NO: 825483 - RNA, 20 nt, Artificial Sequence
  Synthetic
caagcccuuucagacucuuu

SEQ ID NO: 825484 - RNA, 20 nt, Artificial Sequence
  Synthetic
uaugcugugauagacucuuu

SEQ ID NO: 825485 - RNA, 20 nt, Artificial Sequence
  Synthetic
cuucuggcuaguuacucuuu

SEQ ID NO: 825486 - RNA, 20 nt, Artificial Sequence
  Synthetic
aggugugcaaaaaccucuuu

SEQ ID NO: 825487 - RNA, 20 nt, Artificial Sequence
  Synthetic
aucccugcaagggccucuuu

SEQ ID NO: 825488 - RNA, 20 nt, Artificial Sequence
  Synthetic
accacuauuaauuccucuuu

SEQ ID NO: 825489 - RNA, 20 nt, Artificial Sequence
  Synthetic
auacaauaauuaagcucuuu

SEQ ID NO: 825490 - RNA, 20 nt, Artificial Sequence
  Synthetic
accuguaaucccagcucuuu

SEQ ID NO: 825491 - RNA, 20 nt, Artificial Sequence
  Synthetic
uuuuaggaaagcagcucuuu

SEQ ID NO: 825492 - RNA, 20 nt, Artificial Sequence
  Synthetic
aguccuaagaucagcucuuu

SEQ ID NO: 825493 - RNA, 20 nt, Artificial Sequence
  Synthetic
cuucccaaaccuugcucuuu

SEQ ID NO: 825494 - RNA, 20 nt, Artificial Sequence
  Synthetic
aagaaaucguccaucucuuu

SEQ ID NO: 825495 - RNA, 20 nt, Artificial Sequence
  Synthetic
uugaugaaaaucaucucuuu

SEQ ID NO: 825496 - RNA, 20 nt, Artificial Sequence
  Synthetic
aaugcuagaaaucucucuuu

SEQ ID NO: 825497 - RNA, 20 nt, Artificial Sequence
  Synthetic
ucuaccuacagucucucuuu

SEQ ID NO: 825498 - RNA, 20 nt, Artificial Sequence
  Synthetic
uggcuauccccauucucuuu

SEQ ID NO: 825499 - RNA, 20 nt, Artificial Sequence
  Synthetic
uaccugggcuuauucucuuu

SEQ ID NO: 825500 - RNA, 20 nt, Artificial Sequence
  Synthetic
aaacauaaugacuucucuuu

SEQ ID NO: 825501 - RNA, 20 nt, Artificial Sequence
  Synthetic
aaaaauguugacuucucuuu

SEQ ID NO: 825502 - RNA, 20 nt, Artificial Sequence
  Synthetic
uuuuugccaauguucucuuu

SEQ ID NO: 825503 - RNA, 20 nt, Artificial Sequence
  Synthetic
aaacaggccuauuucucuuu

SEQ ID NO: 825504 - RNA, 20 nt, Artificial Sequence
  Synthetic
cuucucaaagagaagucuuu

SEQ ID NO: 825505 - RNA, 20 nt, Artificial Sequence
  Synthetic
auaaaacaaaauaagucuuu

SEQ ID NO: 825506 - RNA, 20 nt, Artificial Sequence
  Synthetic
ugcccuagggguaagucuuu

SEQ ID NO: 825507 - RNA, 20 nt, Artificial Sequence
  Synthetic
cuuacugaaucagagucuuu

SEQ ID NO: 825508 - RNA, 20 nt, Artificial Sequence
  Synthetic
uuuuugugauuguagucuuu

SEQ ID NO: 825509 - RNA, 20 nt, Artificial Sequence
  Synthetic
uuuucaucuccuaggucuuu

SEQ ID NO: 825510 - RNA, 20 nt, Artificial Sequence
  Synthetic
uuuuaggguuauuggucuuu

SEQ ID NO: 825511 - RNA, 20 nt, Artificial Sequence
  Synthetic
acuuuacugggaaugucuuu

SEQ ID NO: 825512 - RNA, 20 nt, Artificial Sequence
  Synthetic
cugaaagaagacaugucuuu

SEQ ID NO: 825513 - RNA, 20 nt, Artificial Sequence
  Synthetic
auauucuauuacaugucuuu

SEQ ID NO: 825514 - RNA, 20 nt, Artificial Sequence
  Synthetic
cgaagacaagggaugucuuu

SEQ ID NO: 825515 - RNA, 20 nt, Artificial Sequence
  Synthetic
caggcuuuuaguaugucuuu

SEQ ID NO: 825516 - RNA, 20 nt, Artificial Sequence
  Synthetic
auuuguaauugccugucuuu

SEQ ID NO: 825517 - RNA, 20 nt, Artificial Sequence
  Synthetic
auugguuauugccugucuuu

SEQ ID NO: 825518 - RNA, 20 nt, Artificial Sequence
  Synthetic
cuaacuggcuggcugucuuu

SEQ ID NO: 825519 - RNA, 20 nt, Artificial Sequence
  Synthetic
agguagauuauucugucuuu

SEQ ID NO: 825520 - RNA, 20 nt, Artificial Sequence
  Synthetic
caguaugaaaaugugucuuu

SEQ ID NO: 825521 - RNA, 20 nt, Artificial Sequence
  Synthetic
agcacuacaaaauugucuuu

SEQ ID NO: 825522 - RNA, 20 nt, Artificial Sequence
  Synthetic
cauuuuugguacuugucuuu

SEQ ID NO: 825523 - RNA, 20 nt, Artificial Sequence
  Synthetic
uuuuucuuauuguugucuuu

SEQ ID NO: 825524 - RNA, 20 nt, Artificial Sequence
  Synthetic
uuuuuuguuuuguugucuuu

SEQ ID NO: 825525 - RNA, 20 nt, Artificial Sequence
  Synthetic
caagguagauuaaauucuuu

SEQ ID NO: 825526 - RNA, 20 nt, Artificial Sequence
  Synthetic
cauacugguuuaaauucuuu

SEQ ID NO: 825527 - RNA, 20 nt, Artificial Sequence
  Synthetic
ucuuuuuggcagaauucuuu

SEQ ID NO: 825528 - RNA, 20 nt, Artificial Sequence
  Synthetic
aauuuguuuaauaauucuuu

SEQ ID NO: 825529 - RNA, 20 nt, Artificial Sequence
  Synthetic
uguuuuugaaggcauucuuu

SEQ ID NO: 825530 - RNA, 20 nt, Artificial Sequence
  Synthetic
ugaagcaucucucauucuuu

SEQ ID NO: 825531 - RNA, 20 nt, Artificial Sequence
  Synthetic
ucuuaaaauguagauucuuu

SEQ ID NO: 825532 - RNA, 20 nt, Artificial Sequence
  Synthetic
acacuuuucccugauucuuu

SEQ ID NO: 825533 - RNA, 20 nt, Artificial Sequence
  Synthetic
uugucuggaacauauucuuu

SEQ ID NO: 825534 - RNA, 20 nt, Artificial Sequence
  Synthetic
augaggcuaguauauucuuu

SEQ ID NO: 825535 - RNA, 20 nt, Artificial Sequence
  Synthetic
ucugaugacuauuauucuuu

SEQ ID NO: 825536 - RNA, 20 nt, Artificial Sequence
  Synthetic
auuguuuacauuuauucuuu

SEQ ID NO: 825537 - RNA, 20 nt, Artificial Sequence
  Synthetic
auuuauggcuuuuauucuuu

SEQ ID NO: 825538 - RNA, 20 nt, Artificial Sequence
  Synthetic
uaauaacaaagcacuucuuu

SEQ ID NO: 825539 - RNA, 20 nt, Artificial Sequence
  Synthetic
auaaugcuauugacuucuuu

SEQ ID NO: 825540 - RNA, 20 nt, Artificial Sequence
  Synthetic
agaagccacaaaccuucuuu

SEQ ID NO: 825541 - RNA, 20 nt, Artificial Sequence
  Synthetic
uguaaaccauuaucuucuuu

SEQ ID NO: 825542 - RNA, 20 nt, Artificial Sequence
  Synthetic
aauacugauuucaguucuuu

SEQ ID NO: 825543 - RNA, 20 nt, Artificial Sequence
  Synthetic
cuuuuuaaacuugguucuuu

SEQ ID NO: 825544 - RNA, 20 nt, Artificial Sequence
  Synthetic
auaagugcuuauuguucuuu

SEQ ID NO: 825545 - RNA, 20 nt, Artificial Sequence
  Synthetic
aagauuggugcuuguucuuu

SEQ ID NO: 825546 - RNA, 20 nt, Artificial Sequence
  Synthetic
ugccuccagcuuuguucuuu

SEQ ID NO: 825547 - RNA, 20 nt, Artificial Sequence
  Synthetic
uauaauucuggaauuucuuu

SEQ ID NO: 825548 - RNA, 20 nt, Artificial Sequence
  Synthetic
uguaauucuuggauuucuuu

SEQ ID NO: 825549 - RNA, 20 nt, Artificial Sequence
  Synthetic
agaccauuuaguauuucuuu

SEQ ID NO: 825550 - RNA, 20 nt, Artificial Sequence
  Synthetic
uauacugauuuccuuucuuu

SEQ ID NO: 825551 - RNA, 20 nt, Artificial Sequence
  Synthetic
aaacaucaaaugcuuucuuu

SEQ ID NO: 825552 - RNA, 20 nt, Artificial Sequence
  Synthetic
uauacugauuugcuuucuuu

SEQ ID NO: 825553 - RNA, 20 nt, Artificial Sequence
  Synthetic
ugaguucaaauaguuucuuu

SEQ ID NO: 825554 - RNA, 20 nt, Artificial Sequence
  Synthetic
agcaaucaggggguuucuuu

SEQ ID NO: 825555 - RNA, 20 nt, Artificial Sequence
  Synthetic
ucuuuuguccaauuuucuuu

SEQ ID NO: 825556 - RNA, 20 nt, Artificial Sequence
  Synthetic
caggcagcagaauuuucuuu

SEQ ID NO: 825557 - RNA, 20 nt, Artificial Sequence
  Synthetic
aggaauuuaagauuuucuuu

SEQ ID NO: 825558 - RNA, 20 nt, Artificial Sequence
  Synthetic
ugguuucugugauuuucuuu

SEQ ID NO: 825559 - RNA, 20 nt, Artificial Sequence
  Synthetic
uauacugauuuauuuucuuu

SEQ ID NO: 825560 - RNA, 20 nt, Artificial Sequence
  Synthetic
accaaugugggcuuuucuuu

SEQ ID NO: 825561 - RNA, 20 nt, Artificial Sequence
  Synthetic
auuuaggagcuguuuucuuu

SEQ ID NO: 825562 - RNA, 20 nt, Artificial Sequence
  Synthetic
uagaaccauuuguuuucuuu

SEQ ID NO: 825563 - RNA, 20 nt, Artificial Sequence
  Synthetic
uagaccugauauuuuucuuu

SEQ ID NO: 825564 - RNA, 20 nt, Artificial Sequence
  Synthetic
uucuuucccugaaaaaguuu

SEQ ID NO: 825565 - RNA, 20 nt, Artificial Sequence
  Synthetic
ugaagaggaaguaaaaguuu

SEQ ID NO: 825566 - RNA, 20 nt, Artificial Sequence
  Synthetic
aucugaaauguuaaaaguuu

SEQ ID NO: 825567 - RNA, 20 nt, Artificial Sequence
  Synthetic
uuuugcaugaaacaaaguuu

SEQ ID NO: 825568 - RNA, 20 nt, Artificial Sequence
  Synthetic
uuuaaaagucuccaaaguuu

SEQ ID NO: 825569 - RNA, 20 nt, Artificial Sequence
  Synthetic
aaaaaaauaaagcaaaguuu

SEQ ID NO: 825570 - RNA, 20 nt, Artificial Sequence
  Synthetic
uuagacacauaucaaaguuu

SEQ ID NO: 825571 - RNA, 20 nt, Artificial Sequence
  Synthetic
ugggagaguguagaaaguuu

SEQ ID NO: 825572 - RNA, 20 nt, Artificial Sequence
  Synthetic
aaccagauaauggaaaguuu

SEQ ID NO: 825573 - RNA, 20 nt, Artificial Sequence
  Synthetic
auccagauaauggaaaguuu

SEQ ID NO: 825574 - RNA, 20 nt, Artificial Sequence
  Synthetic
auuuccaaaucuuaaaguuu

SEQ ID NO: 825575 - RNA, 20 nt, Artificial Sequence
  Synthetic
caaaauguuuuuuaaaguuu

SEQ ID NO: 825576 - RNA, 20 nt, Artificial Sequence
  Synthetic
agggcaauaucuacaaguuu

SEQ ID NO: 825577 - RNA, 20 nt, Artificial Sequence
  Synthetic
aggcaagucugagcaaguuu

SEQ ID NO: 825578 - RNA, 20 nt, Artificial Sequence
  Synthetic
aaauaagacagcucaaguuu

SEQ ID NO: 825579 - RNA, 20 nt, Artificial Sequence
  Synthetic
augagucaggagagaaguuu

SEQ ID NO: 825580 - RNA, 20 nt, Artificial Sequence
  Synthetic
caaagauggaugagaaguuu

SEQ ID NO: 825581 - RNA, 20 nt, Artificial Sequence
  Synthetic
acuuuaccuacucgaaguuu

SEQ ID NO: 825582 - RNA, 20 nt, Artificial Sequence
  Synthetic
cugaagugggaaggaaguuu

SEQ ID NO: 825583 - RNA, 20 nt, Artificial Sequence
  Synthetic
auuaaaacauaaggaaguuu

SEQ ID NO: 825584 - RNA, 20 nt, Artificial Sequence
  Synthetic
caacauaauauuggaaguuu

SEQ ID NO: 825585 - RNA, 20 nt, Artificial Sequence
  Synthetic
uuacugaagccaugaaguuu

SEQ ID NO: 825586 - RNA, 20 nt, Artificial Sequence
  Synthetic
aaauaauggcaaauaaguuu

SEQ ID NO: 825587 - RNA, 20 nt, Artificial Sequence
  Synthetic
uuaaauuuuaccauaaguuu

SEQ ID NO: 825588 - RNA, 20 nt, Artificial Sequence
  Synthetic
cagccuccucccauaaguuu

SEQ ID NO: 825589 - RNA, 20 nt, Artificial Sequence
  Synthetic
uuuuucuucucuauaaguuu

SEQ ID NO: 825590 - RNA, 20 nt, Artificial Sequence
  Synthetic
uacuuuaggacacuaaguuu

SEQ ID NO: 825591 - RNA, 20 nt, Artificial Sequence
  Synthetic
uuuguuuuacuucuaaguuu

SEQ ID NO: 825592 - RNA, 20 nt, Artificial Sequence
  Synthetic
auaacauuuuugguaaguuu

SEQ ID NO: 825593 - RNA, 20 nt, Artificial Sequence
  Synthetic
cguuuugaacuguuaaguuu

SEQ ID NO: 825594 - RNA, 20 nt, Artificial Sequence
  Synthetic
ugucagcauucaaacaguuu

SEQ ID NO: 825595 - RNA, 20 nt, Artificial Sequence
  Synthetic
uuucugagcagaaacaguuu

SEQ ID NO: 825596 - RNA, 20 nt, Artificial Sequence
  Synthetic
auuauggguuucaacaguuu

SEQ ID NO: 825597 - RNA, 20 nt, Artificial Sequence
  Synthetic
aggacugucuaacacaguuu

SEQ ID NO: 825598 - RNA, 20 nt, Artificial Sequence
  Synthetic
aaauaaauuuaacacaguuu

SEQ ID NO: 825599 - RNA, 20 nt, Artificial Sequence
  Synthetic
agaugagagaaccacaguuu

SEQ ID NO: 825600 - RNA, 20 nt, Artificial Sequence
  Synthetic
uccccuaacgugcacaguuu

SEQ ID NO: 825601 - RNA, 20 nt, Artificial Sequence
  Synthetic
uaauucaguuuucacaguuu

SEQ ID NO: 825602 - RNA, 20 nt, Artificial Sequence
  Synthetic
uucguguacaaagacaguuu

SEQ ID NO: 825603 - RNA, 20 nt, Artificial Sequence
  Synthetic
uuucaaucugaauacaguuu

SEQ ID NO: 825604 - RNA, 20 nt, Artificial Sequence
  Synthetic
cccacuguggaaagcaguuu

SEQ ID NO: 825605 - RNA, 20 nt, Artificial Sequence
  Synthetic
auaaauggguuaagcaguuu

SEQ ID NO: 825606 - RNA, 20 nt, Artificial Sequence
  Synthetic
accucuccauggagcaguuu

SEQ ID NO: 825607 - RNA, 20 nt, Artificial Sequence
  Synthetic
auauuuaggcaaggcaguuu

SEQ ID NO: 825608 - RNA, 20 nt, Artificial Sequence
  Synthetic
aguugaugaacaggcaguuu

SEQ ID NO: 825609 - RNA, 20 nt, Artificial Sequence
  Synthetic
aaugaugugaggggcaguuu

SEQ ID NO: 825610 - RNA, 20 nt, Artificial Sequence
  Synthetic
auuguguuuucaugcaguuu

SEQ ID NO: 825611 - RNA, 20 nt, Artificial Sequence
  Synthetic
ugcaaaagaaauugcaguuu

SEQ ID NO: 825612 - RNA, 20 nt, Artificial Sequence
  Synthetic
agauacugcaaaaucaguuu

SEQ ID NO: 825613 - RNA, 20 nt, Artificial Sequence
  Synthetic
uuaaauuucaacaucaguuu

SEQ ID NO: 825614 - RNA, 20 nt, Artificial Sequence
  Synthetic
cauuaugagugucucaguuu

SEQ ID NO: 825615 - RNA, 20 nt, Artificial Sequence
  Synthetic
ucuuuaagaacggucaguuu

SEQ ID NO: 825616 - RNA, 20 nt, Artificial Sequence
  Synthetic
caauuuucauuauucaguuu

SEQ ID NO: 825617 - RNA, 20 nt, Artificial Sequence
  Synthetic
aguugucauuauuucaguuu

SEQ ID NO: 825618 - RNA, 20 nt, Artificial Sequence
  Synthetic
agucuuuauuauuucaguuu

SEQ ID NO: 825619 - RNA, 20 nt, Artificial Sequence
  Synthetic
uauauaaaaucaaagaguuu

SEQ ID NO: 825620 - RNA, 20 nt, Artificial Sequence
  Synthetic
agaaaaauugccaagaguuu

SEQ ID NO: 825621 - RNA, 20 nt, Artificial Sequence
  Synthetic
aacuuuuaugagaagaguuu

SEQ ID NO: 825622 - RNA, 20 nt, Artificial Sequence
  Synthetic
auguagaaaaugaagaguuu

SEQ ID NO: 825623 - RNA, 20 nt, Artificial Sequence
  Synthetic
uugaaauucaugaagaguuu

SEQ ID NO: 825624 - RNA, 20 nt, Artificial Sequence
  Synthetic
uuuagaaagaugaagaguuu

SEQ ID NO: 825625 - RNA, 20 nt, Artificial Sequence
  Synthetic
ugaagaguugaugggaguuu

SEQ ID NO: 825626 - RNA, 20 nt, Artificial Sequence
  Synthetic
cuucaguggguuuggaguuu

SEQ ID NO: 825627 - RNA, 20 nt, Artificial Sequence
  Synthetic
augggaauguaaaugaguuu

SEQ ID NO: 825628 - RNA, 20 nt, Artificial Sequence
  Synthetic
aauguuuuucuccugaguuu

SEQ ID NO: 825629 - RNA, 20 nt, Artificial Sequence
  Synthetic
acuugccacacuuugaguuu

SEQ ID NO: 825630 - RNA, 20 nt, Artificial Sequence
  Synthetic
uaaagauaauaucauaguuu

SEQ ID NO: 825631 - RNA, 20 nt, Artificial Sequence
  Synthetic
uauauauggacucauaguuu

SEQ ID NO: 825632 - RNA, 20 nt, Artificial Sequence
  Synthetic
cacaaccaaaaagauaguuu

SEQ ID NO: 825633 - RNA, 20 nt, Artificial Sequence
  Synthetic
aacuggcacccauauaguuu

SEQ ID NO: 825634 - RNA, 20 nt, Artificial Sequence
  Synthetic
uucuagaaaucuuauaguuu

SEQ ID NO: 825635 - RNA, 20 nt, Artificial Sequence
  Synthetic
aauugauuaucuuauaguuu

SEQ ID NO: 825636 - RNA, 20 nt, Artificial Sequence
  Synthetic
uuuugcuaaaguuauaguuu

SEQ ID NO: 825637 - RNA, 20 nt, Artificial Sequence
  Synthetic
aacuuccaaauuuauaguuu

SEQ ID NO: 825638 - RNA, 20 nt, Artificial Sequence
  Synthetic
uucaaucuccuuacuaguuu

SEQ ID NO: 825639 - RNA, 20 nt, Artificial Sequence
  Synthetic
cauuuacacuaaccuaguuu

SEQ ID NO: 825640 - RNA, 20 nt, Artificial Sequence
  Synthetic
uuauuuggacaugcuaguuu

SEQ ID NO: 825641 - RNA, 20 nt, Artificial Sequence
  Synthetic
aauuugagcucaaguaguuu

SEQ ID NO: 825642 - RNA, 20 nt, Artificial Sequence
  Synthetic
aauaaauacugaaguaguuu

SEQ ID NO: 825643 - RNA, 20 nt, Artificial Sequence
  Synthetic
uuuuauaauuucaguaguuu

SEQ ID NO: 825644 - RNA, 20 nt, Artificial Sequence
  Synthetic
aacauuuguaguuguaguuu

SEQ ID NO: 825645 - RNA, 20 nt, Artificial Sequence
  Synthetic
cuauuccugguuauuaguuu

SEQ ID NO: 825646 - RNA, 20 nt, Artificial Sequence
  Synthetic
aucggucagcaccuuaguuu

SEQ ID NO: 825647 - RNA, 20 nt, Artificial Sequence
  Synthetic
uuuagagaauaucuuaguuu

SEQ ID NO: 825648 - RNA, 20 nt, Artificial Sequence
  Synthetic
ugccucaagaacuuuaguuu

SEQ ID NO: 825649 - RNA, 20 nt, Artificial Sequence
  Synthetic
cuuuauuacuucuuuaguuu

SEQ ID NO: 825650 - RNA, 20 nt, Artificial Sequence
  Synthetic
ucuaggauaccuuuuaguuu

SEQ ID NO: 825651 - RNA, 20 nt, Artificial Sequence
  Synthetic
cuugacagaggagcacguuu

SEQ ID NO: 825652 - RNA, 20 nt, Artificial Sequence
  Synthetic
uacgucucugugucacguuu

SEQ ID NO: 825653 - RNA, 20 nt, Artificial Sequence
  Synthetic
ucauccacugauggacguuu

SEQ ID NO: 825654 - RNA, 20 nt, Artificial Sequence
  Synthetic
agaucauuaaaaauacguuu

SEQ ID NO: 825655 - RNA, 20 nt, Artificial Sequence
  Synthetic
augaagccacuacuacguuu

SEQ ID NO: 825656 - RNA, 20 nt, Artificial Sequence
  Synthetic
uagaucccauuuguccguuu

SEQ ID NO: 825657 - RNA, 20 nt, Artificial Sequence
  Synthetic
caccuguaaucucagcguuu

SEQ ID NO: 825658 - RNA, 20 nt, Artificial Sequence
  Synthetic
agagagaaauauuugcguuu

SEQ ID NO: 825659 - RNA, 20 nt, Artificial Sequence
  Synthetic
aagugguucugaagucguuu

SEQ ID NO: 825660 - RNA, 20 nt, Artificial Sequence
  Synthetic
uuucuggggaaaaaagguuu

SEQ ID NO: 825661 - RNA, 20 nt, Artificial Sequence
  Synthetic
uccccaaaagagcaagguuu

SEQ ID NO: 825662 - RNA, 20 nt, Artificial Sequence
  Synthetic
uugugcuguuuucaagguuu

SEQ ID NO: 825663 - RNA, 20 nt, Artificial Sequence
  Synthetic
aagucacuucaagaagguuu

SEQ ID NO: 825664 - RNA, 20 nt, Artificial Sequence
  Synthetic
uuuucuuuguuggaagguuu

SEQ ID NO: 825665 - RNA, 20 nt, Artificial Sequence
  Synthetic
uuccacaauuuguaagguuu

SEQ ID NO: 825666 - RNA, 20 nt, Artificial Sequence
  Synthetic
auaccuaccuuuuaagguuu

SEQ ID NO: 825667 - RNA, 20 nt, Artificial Sequence
  Synthetic
ugcuguuacaauacagguuu

SEQ ID NO: 825668 - RNA, 20 nt, Artificial Sequence
  Synthetic
uuagaagaaguuacagguuu

SEQ ID NO: 825669 - RNA, 20 nt, Artificial Sequence
  Synthetic
aaaacaguugauccagguuu

SEQ ID NO: 825670 - RNA, 20 nt, Artificial Sequence
  Synthetic
uugaguuacguuccagguuu

SEQ ID NO: 825671 - RNA, 20 nt, Artificial Sequence
  Synthetic
aauucuaaacaagcagguuu

SEQ ID NO: 825672 - RNA, 20 nt, Artificial Sequence
  Synthetic
caugaaggacuggcagguuu

SEQ ID NO: 825673 - RNA, 20 nt, Artificial Sequence
  Synthetic
agaauaaaaauugcagguuu

SEQ ID NO: 825674 - RNA, 20 nt, Artificial Sequence
  Synthetic
uuacugguccguucagguuu

SEQ ID NO: 825675 - RNA, 20 nt, Artificial Sequence
  Synthetic
ugaguguucuugggagguuu

SEQ ID NO: 825676 - RNA, 20 nt, Artificial Sequence
  Synthetic
agcgcaugaugcugagguuu

SEQ ID NO: 825677 - RNA, 20 nt, Artificial Sequence
  Synthetic
auggcgugaugcugagguuu

SEQ ID NO: 825678 - RNA, 20 nt, Artificial Sequence
  Synthetic
acugcgugaugcugagguuu

SEQ ID NO: 825679 - RNA, 20 nt, Artificial Sequence
  Synthetic
ccauuuguaaagugagguuu

SEQ ID NO: 825680 - RNA, 20 nt, Artificial Sequence
  Synthetic
acacuaguaguuugagguuu

SEQ ID NO: 825681 - RNA, 20 nt, Artificial Sequence
  Synthetic
uugcuguaucccauagguuu

SEQ ID NO: 825682 - RNA, 20 nt, Artificial Sequence
  Synthetic
ccuccuuucagcauagguuu

SEQ ID NO: 825683 - RNA, 20 nt, Artificial Sequence
  Synthetic
aauaauacaaagcuagguuu

SEQ ID NO: 825684 - RNA, 20 nt, Artificial Sequence
  Synthetic
ugauuaaugcacguagguuu

SEQ ID NO: 825685 - RNA, 20 nt, Artificial Sequence
  Synthetic
cuugcaccacuauuagguuu

SEQ ID NO: 825686 - RNA, 20 nt, Artificial Sequence
  Synthetic
uuggcauuugauuuagguuu

SEQ ID NO: 825687 - RNA, 20 nt, Artificial Sequence
  Synthetic
aggugcaggagauccgguuu

SEQ ID NO: 825688 - RNA, 20 nt, Artificial Sequence
  Synthetic
uguuauaauguccucgguuu

SEQ ID NO: 825689 - RNA, 20 nt, Artificial Sequence
  Synthetic
augucguuuugaaaggguuu

SEQ ID NO: 825690 - RNA, 20 nt, Artificial Sequence
  Synthetic
aauccagaaacacaggguuu

SEQ ID NO: 825691 - RNA, 20 nt, Artificial Sequence
  Synthetic
uauaaaacugccuaggguuu

SEQ ID NO: 825692 - RNA, 20 nt, Artificial Sequence
  Synthetic
aacaaagaaaaaagggguuu

SEQ ID NO: 825693 - RNA, 20 nt, Artificial Sequence
  Synthetic
uuuguuuguuugggggguuu

SEQ ID NO: 825694 - RNA, 20 nt, Artificial Sequence
  Synthetic
uggcuaugguuuggggguuu

SEQ ID NO: 825695 - RNA, 20 nt, Artificial Sequence
  Synthetic
ucuuuuuccaaaugggguuu

SEQ ID NO: 825696 - RNA, 20 nt, Artificial Sequence
  Synthetic
aauuuugaauuuugggguuu

SEQ ID NO: 825697 - RNA, 20 nt, Artificial Sequence
  Synthetic
cugugggccccucuggguuu

SEQ ID NO: 825698 - RNA, 20 nt, Artificial Sequence
  Synthetic
ccagggacaagaguggguuu

SEQ ID NO: 825699 - RNA, 20 nt, Artificial Sequence
  Synthetic
aauauucagaucaaugguuu

SEQ ID NO: 825700 - RNA, 20 nt, Artificial Sequence
  Synthetic
ugcgugggaggcgaugguuu

SEQ ID NO: 825701 - RNA, 20 nt, Artificial Sequence
  Synthetic
uaggugagauuggaugguuu

SEQ ID NO: 825702 - RNA, 20 nt, Artificial Sequence
  Synthetic
ucuuugaaauuauaugguuu

SEQ ID NO: 825703 - RNA, 20 nt, Artificial Sequence
  Synthetic
ucucuuguuggcuaugguuu

SEQ ID NO: 825704 - RNA, 20 nt, Artificial Sequence
  Synthetic
cauucuuuaagcccugguuu

SEQ ID NO: 825705 - RNA, 20 nt, Artificial Sequence
  Synthetic
uuaugcugcccagcugguuu

SEQ ID NO: 825706 - RNA, 20 nt, Artificial Sequence
  Synthetic
aaaaaaaauaauucugguuu

SEQ ID NO: 825707 - RNA, 20 nt, Artificial Sequence
  Synthetic
cuagucagucuuucugguuu

SEQ ID NO: 825708 - RNA, 20 nt, Artificial Sequence
  Synthetic
uuuuaaacuuuuucugguuu

SEQ ID NO: 825709 - RNA, 20 nt, Artificial Sequence
  Synthetic
accuaaaguuaaauugguuu

SEQ ID NO: 825710 - RNA, 20 nt, Artificial Sequence
  Synthetic
auccugcuagucauugguuu

SEQ ID NO: 825711 - RNA, 20 nt, Artificial Sequence
  Synthetic
uuuuuucaccagcuugguuu

SEQ ID NO: 825712 - RNA, 20 nt, Artificial Sequence
  Synthetic
cuuuggcuuccaguugguuu

SEQ ID NO: 825713 - RNA, 20 nt, Artificial Sequence
  Synthetic
uaaaauauauuuguugguuu

SEQ ID NO: 825714 - RNA, 20 nt, Artificial Sequence
  Synthetic
uuucuaacgaauuuugguuu

SEQ ID NO: 825715 - RNA, 20 nt, Artificial Sequence
  Synthetic
uacugaaguaguuuugguuu

SEQ ID NO: 825716 - RNA, 20 nt, Artificial Sequence
  Synthetic
uagaguuauauaaaauguuu

SEQ ID NO: 825717 - RNA, 20 nt, Artificial Sequence
  Synthetic
aaauuauugggcaaauguuu

SEQ ID NO: 825718 - RNA, 20 nt, Artificial Sequence
  Synthetic
auguuaaaaugacaauguuu

SEQ ID NO: 825719 - RNA, 20 nt, Artificial Sequence
  Synthetic
uccaugagugcccaauguuu

SEQ ID NO: 825720 - RNA, 20 nt, Artificial Sequence
  Synthetic
uuaauccugcuucaauguuu

SEQ ID NO: 825721 - RNA, 20 nt, Artificial Sequence
  Synthetic
caauguaagagagaauguuu

SEQ ID NO: 825722 - RNA, 20 nt, Artificial Sequence
  Synthetic
uugaaaaguagguaauguuu

SEQ ID NO: 825723 - RNA, 20 nt, Artificial Sequence
  Synthetic
aucuggucccagacauguuu

SEQ ID NO: 825724 - RNA, 20 nt, Artificial Sequence
  Synthetic
auauuccaggagacauguuu

SEQ ID NO: 825725 - RNA, 20 nt, Artificial Sequence
  Synthetic
uaauaacucccaccauguuu

SEQ ID NO: 825726 - RNA, 20 nt, Artificial Sequence
  Synthetic
uaaggugaaaaugcauguuu

SEQ ID NO: 825727 - RNA, 20 nt, Artificial Sequence
  Synthetic
cuucccaauccuucauguuu

SEQ ID NO: 825728 - RNA, 20 nt, Artificial Sequence
  Synthetic
augcuuugccuuucauguuu

SEQ ID NO: 825729 - RNA, 20 nt, Artificial Sequence
  Synthetic
auugacuugaacagauguuu

SEQ ID NO: 825730 - RNA, 20 nt, Artificial Sequence
  Synthetic
cuucuccagccuagauguuu

SEQ ID NO: 825731 - RNA, 20 nt, Artificial Sequence
  Synthetic
cuguguuacucaggauguuu

SEQ ID NO: 825732 - RNA, 20 nt, Artificial Sequence
  Synthetic
uugggugaauagggauguuu

SEQ ID NO: 825733 - RNA, 20 nt, Artificial Sequence
  Synthetic
uaaaggaaagauggauguuu

SEQ ID NO: 825734 - RNA, 20 nt, Artificial Sequence
  Synthetic
ucaguuuaauaaugauguuu

SEQ ID NO: 825735 - RNA, 20 nt, Artificial Sequence
  Synthetic
auucuggagcagugauguuu

SEQ ID NO: 825736 - RNA, 20 nt, Artificial Sequence
  Synthetic
agguuguauuggugauguuu

SEQ ID NO: 825737 - RNA, 20 nt, Artificial Sequence
  Synthetic
aauuauagagcaauauguuu

SEQ ID NO: 825738 - RNA, 20 nt, Artificial Sequence
  Synthetic
ugugucauucucauauguuu

SEQ ID NO: 825739 - RNA, 20 nt, Artificial Sequence
  Synthetic
aggagcaaaaugauauguuu

SEQ ID NO: 825740 - RNA, 20 nt, Artificial Sequence
  Synthetic
aggagcagaaugauauguuu

SEQ ID NO: 825741 - RNA, 20 nt, Artificial Sequence
  Synthetic
caccauaaaacgcuauguuu

SEQ ID NO: 825742 - RNA, 20 nt, Artificial Sequence
  Synthetic
ccauaccuuuuucuauguuu

SEQ ID NO: 825743 - RNA, 20 nt, Artificial Sequence
  Synthetic
agauacuggaaaguauguuu

SEQ ID NO: 825744 - RNA, 20 nt, Artificial Sequence
  Synthetic
cauacauaccauguauguuu

SEQ ID NO: 825745 - RNA, 20 nt, Artificial Sequence
  Synthetic
aaaguuauccuuuuauguuu

SEQ ID NO: 825746 - RNA, 20 nt, Artificial Sequence
  Synthetic
accacuuuagaaaacuguuu

SEQ ID NO: 825747 - RNA, 20 nt, Artificial Sequence
  Synthetic
ugaugccuauaaaacuguuu

SEQ ID NO: 825748 - RNA, 20 nt, Artificial Sequence
  Synthetic
uaaaugagaaguaacuguuu

SEQ ID NO: 825749 - RNA, 20 nt, Artificial Sequence
  Synthetic
aagaaauaccuuaacuguuu

SEQ ID NO: 825750 - RNA, 20 nt, Artificial Sequence
  Synthetic
agguacuaugcucacuguuu

SEQ ID NO: 825751 - RNA, 20 nt, Artificial Sequence
  Synthetic
uguguaccuagucacuguuu

SEQ ID NO: 825752 - RNA, 20 nt, Artificial Sequence
  Synthetic
cauguggauugucacuguuu

SEQ ID NO: 825753 - RNA, 20 nt, Artificial Sequence
  Synthetic
aaucugcguugucacuguuu

SEQ ID NO: 825754 - RNA, 20 nt, Artificial Sequence
  Synthetic
cuucuuccucaagacuguuu

SEQ ID NO: 825755 - RNA, 20 nt, Artificial Sequence
  Synthetic
ugucuggugccagacuguuu

SEQ ID NO: 825756 - RNA, 20 nt, Artificial Sequence
  Synthetic
uguaaugaaaaugacuguuu

SEQ ID NO: 825757 - RNA, 20 nt, Artificial Sequence
  Synthetic
aggaugcugguauacuguuu

SEQ ID NO: 825758 - RNA, 20 nt, Artificial Sequence
  Synthetic
acuauguaucccuacuguuu

SEQ ID NO: 825759 - RNA, 20 nt, Artificial Sequence
  Synthetic
cuuauuacauuguacuguuu

SEQ ID NO: 825760 - RNA, 20 nt, Artificial Sequence
  Synthetic
auccuugagucuuacuguuu

SEQ ID NO: 825761 - RNA, 20 nt, Artificial Sequence
  Synthetic
auuuaggacguguccuguuu

SEQ ID NO: 825762 - RNA, 20 nt, Artificial Sequence
  Synthetic
uaggacaucucuuccuguuu

SEQ ID NO: 825763 - RNA, 20 nt, Artificial Sequence
  Synthetic
acaaaauugggcagcuguuu

SEQ ID NO: 825764 - RNA, 20 nt, Artificial Sequence
  Synthetic
cuugcugcugcucgcuguuu

SEQ ID NO: 825765 - RNA, 20 nt, Artificial Sequence
  Synthetic
acaggcauuucuggcuguuu

SEQ ID NO: 825766 - RNA, 20 nt, Artificial Sequence
  Synthetic
uauagcuaauaaugcuguuu

SEQ ID NO: 825767 - RNA, 20 nt, Artificial Sequence
  Synthetic
uucugaagccacugcuguuu

SEQ ID NO: 825768 - RNA, 20 nt, Artificial Sequence
  Synthetic
ucuuaguucaaaaucuguuu

SEQ ID NO: 825769 - RNA, 20 nt, Artificial Sequence
  Synthetic
ccacuucugaagaucuguuu

SEQ ID NO: 825770 - RNA, 20 nt, Artificial Sequence
  Synthetic
cuuaaugcucagaucuguuu

SEQ ID NO: 825771 - RNA, 20 nt, Artificial Sequence
  Synthetic
auuggucuauauaucuguuu

SEQ ID NO: 825772 - RNA, 20 nt, Artificial Sequence
  Synthetic
acugaucuauaucucuguuu

SEQ ID NO: 825773 - RNA, 20 nt, Artificial Sequence
  Synthetic
auugaucuauaucucuguuu

SEQ ID NO: 825774 - RNA, 20 nt, Artificial Sequence
  Synthetic
auuggucuauaucucuguuu

SEQ ID NO: 825775 - RNA, 20 nt, Artificial Sequence
  Synthetic
auugguguauaucucuguuu

SEQ ID NO: 825776 - RNA, 20 nt, Artificial Sequence
  Synthetic
uaguuaacaauucucuguuu

SEQ ID NO: 825777 - RNA, 20 nt, Artificial Sequence
  Synthetic
auauuaaaauaagucuguuu

SEQ ID NO: 825778 - RNA, 20 nt, Artificial Sequence
  Synthetic
auugaucuauaugucuguuu

SEQ ID NO: 825779 - RNA, 20 nt, Artificial Sequence
  Synthetic
uaucagguuuauuucuguuu

SEQ ID NO: 825780 - RNA, 20 nt, Artificial Sequence
  Synthetic
ugcccuaugguuuucuguuu

SEQ ID NO: 825781 - RNA, 20 nt, Artificial Sequence
  Synthetic
uuaaagacuaaaaaguguuu

SEQ ID NO: 825782 - RNA, 20 nt, Artificial Sequence
  Synthetic
uuuuauuucuaaaaguguuu

SEQ ID NO: 825783 - RNA, 20 nt, Artificial Sequence
  Synthetic
acuuguggucccaaguguuu

SEQ ID NO: 825784 - RNA, 20 nt, Artificial Sequence
  Synthetic
aggugaacugguaaguguuu

SEQ ID NO: 825785 - RNA, 20 nt, Artificial Sequence
  Synthetic
uuuaaauacuuucaguguuu

SEQ ID NO: 825786 - RNA, 20 nt, Artificial Sequence
  Synthetic
auauguacaccagaguguuu

SEQ ID NO: 825787 - RNA, 20 nt, Artificial Sequence
  Synthetic
auauuuaauuuuuaguguuu

SEQ ID NO: 825788 - RNA, 20 nt, Artificial Sequence
  Synthetic
auugcucaggaaagguguuu

SEQ ID NO: 825789 - RNA, 20 nt, Artificial Sequence
  Synthetic
aaggcuacaucaagguguuu

SEQ ID NO: 825790 - RNA, 20 nt, Artificial Sequence
  Synthetic
ugccauugcuuuugguguuu

SEQ ID NO: 825791 - RNA, 20 nt, Artificial Sequence
  Synthetic
agaaugcuuuugauguguuu

SEQ ID NO: 825792 - RNA, 20 nt, Artificial Sequence
  Synthetic
uuuguuugugcucuguguuu

SEQ ID NO: 825793 - RNA, 20 nt, Artificial Sequence
  Synthetic
aacucuagauuucuguguuu

SEQ ID NO: 825794 - RNA, 20 nt, Artificial Sequence
  Synthetic
uucugauaaugaguguguuu

SEQ ID NO: 825795 - RNA, 20 nt, Artificial Sequence
  Synthetic
aaaguaauauauguguguuu

SEQ ID NO: 825796 - RNA, 20 nt, Artificial Sequence
  Synthetic
uuuuuguguugauuguguuu

SEQ ID NO: 825797 - RNA, 20 nt, Artificial Sequence
  Synthetic
cuucuuuuucacaauuguuu

SEQ ID NO: 825798 - RNA, 20 nt, Artificial Sequence
  Synthetic
uagaaugcacccaauuguuu

SEQ ID NO: 825799 - RNA, 20 nt, Artificial Sequence
  Synthetic
uuuuguuuguucaauuguuu

SEQ ID NO: 825800 - RNA, 20 nt, Artificial Sequence
  Synthetic
uuuugacccaauaauuguuu

SEQ ID NO: 825801 - RNA, 20 nt, Artificial Sequence
  Synthetic
uccauuuacuguaauuguuu

SEQ ID NO: 825802 - RNA, 20 nt, Artificial Sequence
  Synthetic
caugagaaucaccauuguuu

SEQ ID NO: 825803 - RNA, 20 nt, Artificial Sequence
  Synthetic
caauuaacucugcauuguuu

SEQ ID NO: 825804 - RNA, 20 nt, Artificial Sequence
  Synthetic
auaauauacauauauuguuu

SEQ ID NO: 825805 - RNA, 20 nt, Artificial Sequence
  Synthetic
cuuuugauugguuauuguuu

SEQ ID NO: 825806 - RNA, 20 nt, Artificial Sequence
  Synthetic
caacaugguuuuuauuguuu

SEQ ID NO: 825807 - RNA, 20 nt, Artificial Sequence
  Synthetic
uggaaguaacuaacuuguuu

SEQ ID NO: 825808 - RNA, 20 nt, Artificial Sequence
  Synthetic
auuggucaagucacuuguuu

SEQ ID NO: 825809 - RNA, 20 nt, Artificial Sequence
  Synthetic
cagaaaaaaauaccuuguuu

SEQ ID NO: 825810 - RNA, 20 nt, Artificial Sequence
  Synthetic
auaugauucaugucuuguuu

SEQ ID NO: 825811 - RNA, 20 nt, Artificial Sequence
  Synthetic
ucauuauucuucuguuguuu

SEQ ID NO: 825812 - RNA, 20 nt, Artificial Sequence
  Synthetic
auaauaaguaacauuuguuu

SEQ ID NO: 825813 - RNA, 20 nt, Artificial Sequence
  Synthetic
uugcaaaaaaggauuuguuu

SEQ ID NO: 825814 - RNA, 20 nt, Artificial Sequence
  Synthetic
ucuaaaucucuuauuuguuu

SEQ ID NO: 825815 - RNA, 20 nt, Artificial Sequence
  Synthetic
agccuggagccccuuuguuu

SEQ ID NO: 825816 - RNA, 20 nt, Artificial Sequence
  Synthetic
caagaauauucccuuuguuu

SEQ ID NO: 825817 - RNA, 20 nt, Artificial Sequence
  Synthetic
uucaagauuuaaguuuguuu

SEQ ID NO: 825818 - RNA, 20 nt, Artificial Sequence
  Synthetic
uacaucaaaauaguuuguuu

SEQ ID NO: 825819 - RNA, 20 nt, Artificial Sequence
  Synthetic
uuuaaccaauagguuuguuu

SEQ ID NO: 825820 - RNA, 20 nt, Artificial Sequence
  Synthetic
uacauuuaaacuguuuguuu

SEQ ID NO: 825821 - RNA, 20 nt, Artificial Sequence
  Synthetic
cagcaauccaguguuuguuu

SEQ ID NO: 825822 - RNA, 20 nt, Artificial Sequence
  Synthetic
auaaagcuauuuguuuguuu

SEQ ID NO: 825823 - RNA, 20 nt, Artificial Sequence
  Synthetic
ccuuaaauuuuuguuuguuu

SEQ ID NO: 825824 - RNA, 20 nt, Artificial Sequence
  Synthetic
uggaagcaauaauuuuguuu

SEQ ID NO: 825825 - RNA, 20 nt, Artificial Sequence
  Synthetic
uuaugaauaauauuuuguuu

SEQ ID NO: 825826 - RNA, 20 nt, Artificial Sequence
  Synthetic
auaucagcuaucuuuuguuu

SEQ ID NO: 825827 - RNA, 20 nt, Artificial Sequence
  Synthetic
uuuuauuguugguuuuguuu

SEQ ID NO: 825828 - RNA, 20 nt, Artificial Sequence
  Synthetic
uagaaaucaauguuuuguuu

SEQ ID NO: 825829 - RNA, 20 nt, Artificial Sequence
  Synthetic
uuggacagacaaaaaauuuu

SEQ ID NO: 825830 - RNA, 20 nt, Artificial Sequence
  Synthetic
aaaaauaaggucaaaauuuu

SEQ ID NO: 825831 - RNA, 20 nt, Artificial Sequence
  Synthetic
ucaaaauauuugaaaauuuu

SEQ ID NO: 825832 - RNA, 20 nt, Artificial Sequence
  Synthetic
ugacaaccugcacaaauuuu

SEQ ID NO: 825833 - RNA, 20 nt, Artificial Sequence
  Synthetic
uaacgaauuuuacaaauuuu

SEQ ID NO: 825834 - RNA, 20 nt, Artificial Sequence
  Synthetic
ugugguuccaugcaaauuuu

SEQ ID NO: 825835 - RNA, 20 nt, Artificial Sequence
  Synthetic
uuuuuccccuugcaaauuuu

SEQ ID NO: 825836 - RNA, 20 nt, Artificial Sequence
  Synthetic
aaugucuaggaagaaauuuu

SEQ ID NO: 825837 - RNA, 20 nt, Artificial Sequence
  Synthetic
auaauuuucauagaaauuuu

SEQ ID NO: 825838 - RNA, 20 nt, Artificial Sequence
  Synthetic
aaaacuuggcaauaaauuuu

SEQ ID NO: 825839 - RNA, 20 nt, Artificial Sequence
  Synthetic
cuaugauagagauaaauuuu

SEQ ID NO: 825840 - RNA, 20 nt, Artificial Sequence
  Synthetic
ucagcaucccacuaaauuuu

SEQ ID NO: 825841 - RNA, 20 nt, Artificial Sequence
  Synthetic
uagauacauuauuaaauuuu

SEQ ID NO: 825842 - RNA, 20 nt, Artificial Sequence
  Synthetic
auuauuauacuuuaaauuuu

SEQ ID NO: 825843 - RNA, 20 nt, Artificial Sequence
  Synthetic
aucuuuauccuuuaaauuuu

SEQ ID NO: 825844 - RNA, 20 nt, Artificial Sequence
  Synthetic
aaaaaaaucucaacaauuuu

SEQ ID NO: 825845 - RNA, 20 nt, Artificial Sequence
  Synthetic
ucuauuuuacuaacaauuuu

SEQ ID NO: 825846 - RNA, 20 nt, Artificial Sequence
  Synthetic
aaugacacugguacaauuuu

SEQ ID NO: 825847 - RNA, 20 nt, Artificial Sequence
  Synthetic
ugccuccccagugcaauuuu

SEQ ID NO: 825848 - RNA, 20 nt, Artificial Sequence
  Synthetic
aaccuuaaaaaaucaauuuu

SEQ ID NO: 825849 - RNA, 20 nt, Artificial Sequence
  Synthetic
aaguuccacuugucaauuuu

SEQ ID NO: 825850 - RNA, 20 nt, Artificial Sequence
  Synthetic
auuuuaguuacuucaauuuu

SEQ ID NO: 825851 - RNA, 20 nt, Artificial Sequence
  Synthetic
uugagaagaacaagaauuuu

SEQ ID NO: 825852 - RNA, 20 nt, Artificial Sequence
  Synthetic
uaauccuggaacagaauuuu

SEQ ID NO: 825853 - RNA, 20 nt, Artificial Sequence
  Synthetic
uggaaggaucagagaauuuu

SEQ ID NO: 825854 - RNA, 20 nt, Artificial Sequence
  Synthetic
uuauagccacauggaauuuu

SEQ ID NO: 825855 - RNA, 20 nt, Artificial Sequence
  Synthetic
cauuuuuugguuggaauuuu

SEQ ID NO: 825856 - RNA, 20 nt, Artificial Sequence
  Synthetic
uuuagauucauaugaauuuu

SEQ ID NO: 825857 - RNA, 20 nt, Artificial Sequence
  Synthetic
ugugguuucauaugaauuuu

SEQ ID NO: 825858 - RNA, 20 nt, Artificial Sequence
  Synthetic
uggauaugauucugaauuuu

SEQ ID NO: 825859 - RNA, 20 nt, Artificial Sequence
  Synthetic
auagcacugaagugaauuuu

SEQ ID NO: 825860 - RNA, 20 nt, Artificial Sequence
  Synthetic
augggagaagagugaauuuu

SEQ ID NO: 825861 - RNA, 20 nt, Artificial Sequence
  Synthetic
ucucugauugugugaauuuu

SEQ ID NO: 825862 - RNA, 20 nt, Artificial Sequence
  Synthetic
uauuuccaauuuugaauuuu

SEQ ID NO: 825863 - RNA, 20 nt, Artificial Sequence
  Synthetic
aauagggaagaaauaauuuu

SEQ ID NO: 825864 - RNA, 20 nt, Artificial Sequence
  Synthetic
cauugaaauugcauaauuuu

SEQ ID NO: 825865 - RNA, 20 nt, Artificial Sequence
  Synthetic
auuaauacucucauaauuuu

SEQ ID NO: 825866 - RNA, 20 nt, Artificial Sequence
  Synthetic
auguuauaauuuauaauuuu

SEQ ID NO: 825867 - RNA, 20 nt, Artificial Sequence
  Synthetic
uucuuucuuccacuaauuuu

SEQ ID NO: 825868 - RNA, 20 nt, Artificial Sequence
  Synthetic
cucccugccucccuaauuuu

SEQ ID NO: 825869 - RNA, 20 nt, Artificial Sequence
  Synthetic
caccacacccagcuaauuuu

SEQ ID NO: 825870 - RNA, 20 nt, Artificial Sequence
  Synthetic
aaaucaaaaucaguaauuuu

SEQ ID NO: 825871 - RNA, 20 nt, Artificial Sequence
  Synthetic
cuuuacucaugaguaauuuu

SEQ ID NO: 825872 - RNA, 20 nt, Artificial Sequence
  Synthetic
uuuuuaugagcuguaauuuu

SEQ ID NO: 825873 - RNA, 20 nt, Artificial Sequence
  Synthetic
aaggucuaacuuguaauuuu

SEQ ID NO: 825874 - RNA, 20 nt, Artificial Sequence
  Synthetic
uucuguuuugaauuaauuuu

SEQ ID NO: 825875 - RNA, 20 nt, Artificial Sequence
  Synthetic
acuauuaaaacauuaauuuu

SEQ ID NO: 825876 - RNA, 20 nt, Artificial Sequence
  Synthetic
agaucccacuuguuaauuuu

SEQ ID NO: 825877 - RNA, 20 nt, Artificial Sequence
  Synthetic
uguccuugguauuuaauuuu

SEQ ID NO: 825878 - RNA, 20 nt, Artificial Sequence
  Synthetic
ugaacauauucaaacauuuu

SEQ ID NO: 825879 - RNA, 20 nt, Artificial Sequence
  Synthetic
aucccuuuccagaacauuuu

SEQ ID NO: 825880 - RNA, 20 nt, Artificial Sequence
  Synthetic
ucuaaaugccauaacauuuu

SEQ ID NO: 825881 - RNA, 20 nt, Artificial Sequence
  Synthetic
uauauaugaccuaacauuuu

SEQ ID NO: 825882 - RNA, 20 nt, Artificial Sequence
  Synthetic
aaucuuuacauuaacauuuu

SEQ ID NO: 825883 - RNA, 20 nt, Artificial Sequence
  Synthetic
uguucagcaaaccacauuuu

SEQ ID NO: 825884 - RNA, 20 nt, Artificial Sequence
  Synthetic
caaagucgcuuccacauuuu

SEQ ID NO: 825885 - RNA, 20 nt, Artificial Sequence
  Synthetic
caaaguugcuuccacauuuu

SEQ ID NO: 825886 - RNA, 20 nt, Artificial Sequence
  Synthetic
cacaggauuuuccacauuuu

SEQ ID NO: 825887 - RNA, 20 nt, Artificial Sequence
  Synthetic
agauauguugggcacauuuu

SEQ ID NO: 825888 - RNA, 20 nt, Artificial Sequence
  Synthetic
acuuuuccuuggcacauuuu

SEQ ID NO: 825889 - RNA, 20 nt, Artificial Sequence
  Synthetic
ccccaaguauuucacauuuu

SEQ ID NO: 825890 - RNA, 20 nt, Artificial Sequence
  Synthetic
acugugcuuuuugacauuuu

SEQ ID NO: 825891 - RNA, 20 nt, Artificial Sequence
  Synthetic
auuuucaaaaccuacauuuu

SEQ ID NO: 825892 - RNA, 20 nt, Artificial Sequence
  Synthetic
cacugcuuguccuacauuuu

SEQ ID NO: 825893 - RNA, 20 nt, Artificial Sequence
  Synthetic
uaccagaacauuuacauuuu

SEQ ID NO: 825894 - RNA, 20 nt, Artificial Sequence
  Synthetic
uuuuuuuuuuuaaccauuuu

SEQ ID NO: 825895 - RNA, 20 nt, Artificial Sequence
  Synthetic
auuguuuuuugcaccauuuu

SEQ ID NO: 825896 - RNA, 20 nt, Artificial Sequence
  Synthetic
ccaacucuguuucccauuuu

SEQ ID NO: 825897 - RNA, 20 nt, Artificial Sequence
  Synthetic
cuuggggcuaacgccauuuu

SEQ ID NO: 825898 - RNA, 20 nt, Artificial Sequence
  Synthetic
acucugaguccuuccauuuu

SEQ ID NO: 825899 - RNA, 20 nt, Artificial Sequence
  Synthetic
augaaccaggguuccauuuu

SEQ ID NO: 825900 - RNA, 20 nt, Artificial Sequence
  Synthetic
acuuuauuauuuuccauuuu

SEQ ID NO: 825901 - RNA, 20 nt, Artificial Sequence
  Synthetic
uuuuugguaucaagcauuuu

SEQ ID NO: 825902 - RNA, 20 nt, Artificial Sequence
  Synthetic
agguucuuggacagcauuuu

SEQ ID NO: 825903 - RNA, 20 nt, Artificial Sequence
  Synthetic
accuguaaucccagcauuuu

SEQ ID NO: 825904 - RNA, 20 nt, Artificial Sequence
  Synthetic
cucagcuccaugagcauuuu

SEQ ID NO: 825905 - RNA, 20 nt, Artificial Sequence
  Synthetic
uugaacaagggaggcauuuu

SEQ ID NO: 825906 - RNA, 20 nt, Artificial Sequence
  Synthetic
uauuauaacuagggcauuuu

SEQ ID NO: 825907 - RNA, 20 nt, Artificial Sequence
  Synthetic
augcuuaucaaaugcauuuu

SEQ ID NO: 825908 - RNA, 20 nt, Artificial Sequence
  Synthetic
auuugacuuuugugcauuuu

SEQ ID NO: 825909 - RNA, 20 nt, Artificial Sequence
  Synthetic
agauucuuuucuaucauuuu

SEQ ID NO: 825910 - RNA, 20 nt, Artificial Sequence
  Synthetic
aucagcaguaaacucauuuu

SEQ ID NO: 825911 - RNA, 20 nt, Artificial Sequence
  Synthetic
uaaauuauuucccucauuuu

SEQ ID NO: 825912 - RNA, 20 nt, Artificial Sequence
  Synthetic
ccuaacuuauuucucauuuu

SEQ ID NO: 825913 - RNA, 20 nt, Artificial Sequence
  Synthetic
caaaucacacaauucauuuu

SEQ ID NO: 825914 - RNA, 20 nt, Artificial Sequence
  Synthetic
caagaauaacacuucauuuu

SEQ ID NO: 825915 - RNA, 20 nt, Artificial Sequence
  Synthetic
cugcuuucauucuucauuuu

SEQ ID NO: 825916 - RNA, 20 nt, Artificial Sequence
  Synthetic
uuugugcauuucuucauuuu

SEQ ID NO: 825917 - RNA, 20 nt, Artificial Sequence
  Synthetic
uugacagaaaaguucauuuu

SEQ ID NO: 825918 - RNA, 20 nt, Artificial Sequence
  Synthetic
auaccuacguauuucauuuu

SEQ ID NO: 825919 - RNA, 20 nt, Artificial Sequence
  Synthetic
uagacuucuuauuucauuuu

SEQ ID NO: 825920 - RNA, 20 nt, Artificial Sequence
  Synthetic
uaugaguauuguuucauuuu

SEQ ID NO: 825921 - RNA, 20 nt, Artificial Sequence
  Synthetic
uaauuaucugcaaagauuuu

SEQ ID NO: 825922 - RNA, 20 nt, Artificial Sequence
  Synthetic
auguccuucaagaagauuuu

SEQ ID NO: 825923 - RNA, 20 nt, Artificial Sequence
  Synthetic
uaucagcuuaagaagauuuu

SEQ ID NO: 825924 - RNA, 20 nt, Artificial Sequence
  Synthetic
uuaugcugaaauaagauuuu

SEQ ID NO: 825925 - RNA, 20 nt, Artificial Sequence
  Synthetic
uaagggauguguaagauuuu

SEQ ID NO: 825926 - RNA, 20 nt, Artificial Sequence
  Synthetic
auggaauaccuuaagauuuu

SEQ ID NO: 825927 - RNA, 20 nt, Artificial Sequence
  Synthetic
aguuagcagguuaagauuuu

SEQ ID NO: 825928 - RNA, 20 nt, Artificial Sequence
  Synthetic
cacaaaaccaaacagauuuu

SEQ ID NO: 825929 - RNA, 20 nt, Artificial Sequence
  Synthetic
cuucaugggagacagauuuu

SEQ ID NO: 825930 - RNA, 20 nt, Artificial Sequence
  Synthetic
uuauaaaaccaucagauuuu

SEQ ID NO: 825931 - RNA, 20 nt, Artificial Sequence
  Synthetic
uaaauuagaacagagauuuu

SEQ ID NO: 825932 - RNA, 20 nt, Artificial Sequence
  Synthetic
cgcucaguuuuagagauuuu

SEQ ID NO: 825933 - RNA, 20 nt, Artificial Sequence
  Synthetic
uaucagcuuaaggagauuuu

SEQ ID NO: 825934 - RNA, 20 nt, Artificial Sequence
  Synthetic
aaaaauuuauaauagauuuu

SEQ ID NO: 825935 - RNA, 20 nt, Artificial Sequence
  Synthetic
aaacuacuuuucuagauuuu

SEQ ID NO: 825936 - RNA, 20 nt, Artificial Sequence
  Synthetic
uaucacccacaguagauuuu

SEQ ID NO: 825937 - RNA, 20 nt, Artificial Sequence
  Synthetic
aagaaauacuuaacgauuuu

SEQ ID NO: 825938 - RNA, 20 nt, Artificial Sequence
  Synthetic
cugaagggcccuaggauuuu

SEQ ID NO: 825939 - RNA, 20 nt, Artificial Sequence
  Synthetic
cuuaagggcccuaggauuuu

SEQ ID NO: 825940 - RNA, 20 nt, Artificial Sequence
  Synthetic
aagcaugguacagggauuuu

SEQ ID NO: 825941 - RNA, 20 nt, Artificial Sequence
  Synthetic
cugaggugaacugggauuuu

SEQ ID NO: 825942 - RNA, 20 nt, Artificial Sequence
  Synthetic
aucugcucuugaaugauuuu

SEQ ID NO: 825943 - RNA, 20 nt, Artificial Sequence
  Synthetic
uaucuauucuucaugauuuu

SEQ ID NO: 825944 - RNA, 20 nt, Artificial Sequence
  Synthetic
aaaauguuauuuaugauuuu

SEQ ID NO: 825945 - RNA, 20 nt, Artificial Sequence
  Synthetic
uuuggaauacaagugauuuu

SEQ ID NO: 825946 - RNA, 20 nt, Artificial Sequence
  Synthetic
auuuauuugcaagugauuuu

SEQ ID NO: 825947 - RNA, 20 nt, Artificial Sequence
  Synthetic
aaaaugucgaaggugauuuu

SEQ ID NO: 825948 - RNA, 20 nt, Artificial Sequence
  Synthetic
aauuugggggaggugauuuu

SEQ ID NO: 825949 - RNA, 20 nt, Artificial Sequence
  Synthetic
auucaguuuucauugauuuu

SEQ ID NO: 825950 - RNA, 20 nt, Artificial Sequence
  Synthetic
agcaggugccuauugauuuu

SEQ ID NO: 825951 - RNA, 20 nt, Artificial Sequence
  Synthetic
uaggcacuuuuauugauuuu

SEQ ID NO: 825952 - RNA, 20 nt, Artificial Sequence
  Synthetic
aaaauauauaaaaauauuuu

SEQ ID NO: 825953 - RNA, 20 nt, Artificial Sequence
  Synthetic
auucccuuucaaaauauuuu

SEQ ID NO: 825954 - RNA, 20 nt, Artificial Sequence
  Synthetic
aguaggagcuaaaauauuuu

SEQ ID NO: 825955 - RNA, 20 nt, Artificial Sequence
  Synthetic
agccagauaguaaauauuuu

SEQ ID NO: 825956 - RNA, 20 nt, Artificial Sequence
  Synthetic
aaaauaguuuuaaauauuuu

SEQ ID NO: 825957 - RNA, 20 nt, Artificial Sequence
  Synthetic
cacaaugugugcaauauuuu

SEQ ID NO: 825958 - RNA, 20 nt, Artificial Sequence
  Synthetic
augaggcacacgaauauuuu

SEQ ID NO: 825959 - RNA, 20 nt, Artificial Sequence
  Synthetic
uuuaaguuguugaauauuuu

SEQ ID NO: 825960 - RNA, 20 nt, Artificial Sequence
  Synthetic
aguuugguuaauaauauuuu

SEQ ID NO: 825961 - RNA, 20 nt, Artificial Sequence
  Synthetic
cuuguguuuuuuaauauuuu

SEQ ID NO: 825962 - RNA, 20 nt, Artificial Sequence
  Synthetic
ucauaauccaaacauauuuu

SEQ ID NO: 825963 - RNA, 20 nt, Artificial Sequence
  Synthetic
cauuagaaugaacauauuuu

SEQ ID NO: 825964 - RNA, 20 nt, Artificial Sequence
  Synthetic
cuccaggaguaacauauuuu

SEQ ID NO: 825965 - RNA, 20 nt, Artificial Sequence
  Synthetic
ucuuaugagcuacauauuuu

SEQ ID NO: 825966 - RNA, 20 nt, Artificial Sequence
  Synthetic
cuacacaauaaccauauuuu

SEQ ID NO: 825967 - RNA, 20 nt, Artificial Sequence
  Synthetic
cauuaucaaggccauauuuu

SEQ ID NO: 825968 - RNA, 20 nt, Artificial Sequence
  Synthetic
auaauugcauuucauauuuu

SEQ ID NO: 825969 - RNA, 20 nt, Artificial Sequence
  Synthetic
uuaaugauaucagauauuuu

SEQ ID NO: 825970 - RNA, 20 nt, Artificial Sequence
  Synthetic
aucauuuccuaugauauuuu

SEQ ID NO: 825971 - RNA, 20 nt, Artificial Sequence
  Synthetic
auaauauugugugauauuuu

SEQ ID NO: 825972 - RNA, 20 nt, Artificial Sequence
  Synthetic
uuucaauuuguugauauuuu

SEQ ID NO: 825973 - RNA, 20 nt, Artificial Sequence
  Synthetic
uuuguugucucauauauuuu

SEQ ID NO: 825974 - RNA, 20 nt, Artificial Sequence
  Synthetic
aaaagugaaaucuauauuuu

SEQ ID NO: 825975 - RNA, 20 nt, Artificial Sequence
  Synthetic
ugcuugauaggguauauuuu

SEQ ID NO: 825976 - RNA, 20 nt, Artificial Sequence
  Synthetic
uguuuuuuuuuuuauauuuu

SEQ ID NO: 825977 - RNA, 20 nt, Artificial Sequence
  Synthetic
uggguuaggaaaacuauuuu

SEQ ID NO: 825978 - RNA, 20 nt, Artificial Sequence
  Synthetic
caaguuucuaaaacuauuuu

SEQ ID NO: 825979 - RNA, 20 nt, Artificial Sequence
  Synthetic
aagagcuuaauaacuauuuu

SEQ ID NO: 825980 - RNA, 20 nt, Artificial Sequence
  Synthetic
augucuauugucacuauuuu

SEQ ID NO: 825981 - RNA, 20 nt, Artificial Sequence
  Synthetic
aaaauucccucaccuauuuu

SEQ ID NO: 825982 - RNA, 20 nt, Artificial Sequence
  Synthetic
ccaaaguucaucccuauuuu

SEQ ID NO: 825983 - RNA, 20 nt, Artificial Sequence
  Synthetic
aacucaucucucccuauuuu

SEQ ID NO: 825984 - RNA, 20 nt, Artificial Sequence
  Synthetic
auacaugauuaaucuauuuu

SEQ ID NO: 825985 - RNA, 20 nt, Artificial Sequence
  Synthetic
acuguaaaaucaucuauuuu

SEQ ID NO: 825986 - RNA, 20 nt, Artificial Sequence
  Synthetic
auaccuuguguaucuauuuu

SEQ ID NO: 825987 - RNA, 20 nt, Artificial Sequence
  Synthetic
uuauagcuuuauucuauuuu

SEQ ID NO: 825988 - RNA, 20 nt, Artificial Sequence
  Synthetic
ucucuccucacuucuauuuu

SEQ ID NO: 825989 - RNA, 20 nt, Artificial Sequence
  Synthetic
uaaugaaauagcaguauuuu

SEQ ID NO: 825990 - RNA, 20 nt, Artificial Sequence
  Synthetic
aagaacaccaucaguauuuu

SEQ ID NO: 825991 - RNA, 20 nt, Artificial Sequence
  Synthetic
agggagggcaggaguauuuu

SEQ ID NO: 825992 - RNA, 20 nt, Artificial Sequence
  Synthetic
acuaaacuauggaguauuuu

SEQ ID NO: 825993 - RNA, 20 nt, Artificial Sequence
  Synthetic
uacuaggugauacguauuuu

SEQ ID NO: 825994 - RNA, 20 nt, Artificial Sequence
  Synthetic
caggaaaccaaggguauuuu

SEQ ID NO: 825995 - RNA, 20 nt, Artificial Sequence
  Synthetic
acauggauucuggguauuuu

SEQ ID NO: 825996 - RNA, 20 nt, Artificial Sequence
  Synthetic
ucugaaugucuauguauuuu

SEQ ID NO: 825997 - RNA, 20 nt, Artificial Sequence
  Synthetic
uuuuuucauugcuguauuuu

SEQ ID NO: 825998 - RNA, 20 nt, Artificial Sequence
  Synthetic
auagcauagcuguguauuuu

SEQ ID NO: 825999 - RNA, 20 nt, Artificial Sequence
  Synthetic
ccagcuaauuuuuguauuuu

SEQ ID NO: 826000 - RNA, 20 nt, Artificial Sequence
  Synthetic
caguuaauuuuuuguauuuu

SEQ ID NO: 826001 - RNA, 20 nt, Artificial Sequence
  Synthetic
uaccuguuuucaauuauuuu

SEQ ID NO: 826002 - RNA, 20 nt, Artificial Sequence
  Synthetic
auguauuauggaauuauuuu

SEQ ID NO: 826003 - RNA, 20 nt, Artificial Sequence
  Synthetic
ucccccaaaaacauuauuuu

SEQ ID NO: 826004 - RNA, 20 nt, Artificial Sequence
  Synthetic
aaacgggggaggauuauuuu

SEQ ID NO: 826005 - RNA, 20 nt, Artificial Sequence
  Synthetic
cuggcaaaauauauuauuuu

SEQ ID NO: 826006 - RNA, 20 nt, Artificial Sequence
  Synthetic
aagacuaaagcuauuauuuu

SEQ ID NO: 826007 - RNA, 20 nt, Artificial Sequence
  Synthetic
ugaucuaggucuauuauuuu

SEQ ID NO: 826008 - RNA, 20 nt, Artificial Sequence
  Synthetic
aaauuuuagauuauuauuuu

SEQ ID NO: 826009 - RNA, 20 nt, Artificial Sequence
  Synthetic
auuuaagcaugccuuauuuu

SEQ ID NO: 826010 - RNA, 20 nt, Artificial Sequence
  Synthetic
aaaaguuaaaaaguuauuuu

SEQ ID NO: 826011 - RNA, 20 nt, Artificial Sequence
  Synthetic
uauaccaaauuaguuauuuu

SEQ ID NO: 826012 - RNA, 20 nt, Artificial Sequence
  Synthetic
cuaugugaggagguuauuuu

SEQ ID NO: 826013 - RNA, 20 nt, Artificial Sequence
  Synthetic
uuucucauaguauuuauuuu

SEQ ID NO: 826014 - RNA, 20 nt, Artificial Sequence
  Synthetic
uguacuauuaucuuuauuuu

SEQ ID NO: 826015 - RNA, 20 nt, Artificial Sequence
  Synthetic
uucuguaagauguuuauuuu

SEQ ID NO: 826016 - RNA, 20 nt, Artificial Sequence
  Synthetic
acuggccuuguguuuauuuu

SEQ ID NO: 826017 - RNA, 20 nt, Artificial Sequence
  Synthetic
cuccuuaaaaauuuuauuuu

SEQ ID NO: 826018 - RNA, 20 nt, Artificial Sequence
  Synthetic
auuuuuuuaacuuuuauuuu

SEQ ID NO: 826019 - RNA, 20 nt, Artificial Sequence
  Synthetic
uacaauucugguuuuauuuu

SEQ ID NO: 826020 - RNA, 20 nt, Artificial Sequence
  Synthetic
uuuaauuguuguuuuauuuu

SEQ ID NO: 826021 - RNA, 20 nt, Artificial Sequence
  Synthetic
ccaacuuguugaaaacuuuu

SEQ ID NO: 826022 - RNA, 20 nt, Artificial Sequence
  Synthetic
uucaaguugcuccaacuuuu

SEQ ID NO: 826023 - RNA, 20 nt, Artificial Sequence
  Synthetic
acaaguagucugcaacuuuu

SEQ ID NO: 826024 - RNA, 20 nt, Artificial Sequence
  Synthetic
agugagucacaugaacuuuu

SEQ ID NO: 826025 - RNA, 20 nt, Artificial Sequence
  Synthetic
auaugucugguauaacuuuu

SEQ ID NO: 826026 - RNA, 20 nt, Artificial Sequence
  Synthetic
aggguagaagcuuaacuuuu

SEQ ID NO: 826027 - RNA, 20 nt, Artificial Sequence
  Synthetic
aagauuacuaguuaacuuuu

SEQ ID NO: 826028 - RNA, 20 nt, Artificial Sequence
  Synthetic
ccaacuuguuuaacacuuuu

SEQ ID NO: 826029 - RNA, 20 nt, Artificial Sequence
  Synthetic
uuuccaugcuauacacuuuu

SEQ ID NO: 826030 - RNA, 20 nt, Artificial Sequence
  Synthetic
caauuuucuugcccacuuuu

SEQ ID NO: 826031 - RNA, 20 nt, Artificial Sequence
  Synthetic
ccucuguguuucucacuuuu

SEQ ID NO: 826032 - RNA, 20 nt, Artificial Sequence
  Synthetic
aaauauuacagaagacuuuu

SEQ ID NO: 826033 - RNA, 20 nt, Artificial Sequence
  Synthetic
uuauuagaaaugagacuuuu

SEQ ID NO: 826034 - RNA, 20 nt, Artificial Sequence
  Synthetic
aaaauggucuugagacuuuu

SEQ ID NO: 826035 - RNA, 20 nt, Artificial Sequence
  Synthetic
uuuuguggaucuagacuuuu

SEQ ID NO: 826036 - RNA, 20 nt, Artificial Sequence
  Synthetic
aacuuuggacuuggacuuuu

SEQ ID NO: 826037 - RNA, 20 nt, Artificial Sequence
  Synthetic
aaggucaaaucaugacuuuu

SEQ ID NO: 826038 - RNA, 20 nt, Artificial Sequence
  Synthetic
uuucaucagcuuugacuuuu

SEQ ID NO: 826039 - RNA, 20 nt, Artificial Sequence
  Synthetic
cgaaaaaaauaaauacuuuu

SEQ ID NO: 826040 - RNA, 20 nt, Artificial Sequence
  Synthetic
aguaaaucaucacuacuuuu

SEQ ID NO: 826041 - RNA, 20 nt, Artificial Sequence
  Synthetic
aucuuuauuauccuacuuuu

SEQ ID NO: 826042 - RNA, 20 nt, Artificial Sequence
  Synthetic
acaagggaacaucuacuuuu

SEQ ID NO: 826043 - RNA, 20 nt, Artificial Sequence
  Synthetic
uuuggguugguucuacuuuu

SEQ ID NO: 826044 - RNA, 20 nt, Artificial Sequence
  Synthetic
aaaguaaaguuucuacuuuu

SEQ ID NO: 826045 - RNA, 20 nt, Artificial Sequence
  Synthetic
uguuagaaccugguacuuuu

SEQ ID NO: 826046 - RNA, 20 nt, Artificial Sequence
  Synthetic
uugacacaauguguacuuuu

SEQ ID NO: 826047 - RNA, 20 nt, Artificial Sequence
  Synthetic
acuccagggaaguuacuuuu

SEQ ID NO: 826048 - RNA, 20 nt, Artificial Sequence
  Synthetic
agaaguuuucaagaccuuuu

SEQ ID NO: 826049 - RNA, 20 nt, Artificial Sequence
  Synthetic
uaaagaaacuaauaccuuuu

SEQ ID NO: 826050 - RNA, 20 nt, Artificial Sequence
  Synthetic
caagugauaagguaccuuuu

SEQ ID NO: 826051 - RNA, 20 nt, Artificial Sequence
  Synthetic
cuacucaauguuuaccuuuu

SEQ ID NO: 826052 - RNA, 20 nt, Artificial Sequence
  Synthetic
aaaaaucuaauuucccuuuu

SEQ ID NO: 826053 - RNA, 20 nt, Artificial Sequence
  Synthetic
acuggucuuuuuucccuuuu

SEQ ID NO: 826054 - RNA, 20 nt, Artificial Sequence
  Synthetic
cucuuucaaacaggccuuuu

SEQ ID NO: 826055 - RNA, 20 nt, Artificial Sequence
  Synthetic
auggucacgucaggccuuuu

SEQ ID NO: 826056 - RNA, 20 nt, Artificial Sequence
  Synthetic
ucugauuauauuggccuuuu

SEQ ID NO: 826057 - RNA, 20 nt, Artificial Sequence
  Synthetic
aaguuuaggaccugccuuuu

SEQ ID NO: 826058 - RNA, 20 nt, Artificial Sequence
  Synthetic
acacauuguuucugccuuuu

SEQ ID NO: 826059 - RNA, 20 nt, Artificial Sequence
  Synthetic
acuuauaacaugugccuuuu

SEQ ID NO: 826060 - RNA, 20 nt, Artificial Sequence
  Synthetic
ucauuuuuguuuugccuuuu

SEQ ID NO: 826061 - RNA, 20 nt, Artificial Sequence
  Synthetic
uauuuuaaacaaauccuuuu

SEQ ID NO: 826062 - RNA, 20 nt, Artificial Sequence
  Synthetic
cuguauucccuaauccuuuu

SEQ ID NO: 826063 - RNA, 20 nt, Artificial Sequence
  Synthetic
ugcuaucuguauauccuuuu

SEQ ID NO: 826064 - RNA, 20 nt, Artificial Sequence
  Synthetic
ccuaccgucucccuccuuuu

SEQ ID NO: 826065 - RNA, 20 nt, Artificial Sequence
  Synthetic
uuuuaugauuuccuccuuuu

SEQ ID NO: 826066 - RNA, 20 nt, Artificial Sequence
  Synthetic
ucuuuuaaaucucuccuuuu

SEQ ID NO: 826067 - RNA, 20 nt, Artificial Sequence
  Synthetic
cuaaacacuucaguccuuuu

SEQ ID NO: 826068 - RNA, 20 nt, Artificial Sequence
  Synthetic
uuggccaagcuaguccuuuu

SEQ ID NO: 826069 - RNA, 20 nt, Artificial Sequence
  Synthetic
uaguaaucuccauuccuuuu

SEQ ID NO: 826070 - RNA, 20 nt, Artificial Sequence
  Synthetic
augagcauuuacuuccuuuu

SEQ ID NO: 826071 - RNA, 20 nt, Artificial Sequence
  Synthetic
ccaauacuuaccuuccuuuu

SEQ ID NO: 826072 - RNA, 20 nt, Artificial Sequence
  Synthetic
cuuucauacuccuuccuuuu

SEQ ID NO: 826073 - RNA, 20 nt, Artificial Sequence
  Synthetic
auauccuuuuauuuccuuuu

SEQ ID NO: 826074 - RNA, 20 nt, Artificial Sequence
  Synthetic
ugaaaccauguuuuccuuuu

SEQ ID NO: 826075 - RNA, 20 nt, Artificial Sequence
  Synthetic
ucuuagauuacccagcuuuu

SEQ ID NO: 826076 - RNA, 20 nt, Artificial Sequence
  Synthetic
acagaugucuuccagcuuuu

SEQ ID NO: 826077 - RNA, 20 nt, Artificial Sequence
  Synthetic
aaaauacuuaaugagcuuuu

SEQ ID NO: 826078 - RNA, 20 nt, Artificial Sequence
  Synthetic
uuccuuagcugauagcuuuu

SEQ ID NO: 826079 - RNA, 20 nt, Artificial Sequence
  Synthetic
caugaugacauauagcuuuu

SEQ ID NO: 826080 - RNA, 20 nt, Artificial Sequence
  Synthetic
uuuacacaauuuuagcuuuu

SEQ ID NO: 826081 - RNA, 20 nt, Artificial Sequence
  Synthetic
ucucugaauagaaggcuuuu

SEQ ID NO: 826082 - RNA, 20 nt, Artificial Sequence
  Synthetic
aagaauuacugaaggcuuuu

SEQ ID NO: 826083 - RNA, 20 nt, Artificial Sequence
  Synthetic
agcugcgguuucaggcuuuu

SEQ ID NO: 826084 - RNA, 20 nt, Artificial Sequence
  Synthetic
uuaucagcuauauggcuuuu

SEQ ID NO: 826085 - RNA, 20 nt, Artificial Sequence
  Synthetic
cuauagaaaauuaugcuuuu

SEQ ID NO: 826086 - RNA, 20 nt, Artificial Sequence
  Synthetic
uccuuucucuugcugcuuuu

SEQ ID NO: 826087 - RNA, 20 nt, Artificial Sequence
  Synthetic
ucagagucaaaucugcuuuu

SEQ ID NO: 826088 - RNA, 20 nt, Artificial Sequence
  Synthetic
aguggaucauuucugcuuuu

SEQ ID NO: 826089 - RNA, 20 nt, Artificial Sequence
  Synthetic
augaaucauuaauugcuuuu

SEQ ID NO: 826090 - RNA, 20 nt, Artificial Sequence
  Synthetic
aaucuguuaagcuugcuuuu

SEQ ID NO: 826091 - RNA, 20 nt, Artificial Sequence
  Synthetic
uuucagaaaucuuugcuuuu

SEQ ID NO: 826092 - RNA, 20 nt, Artificial Sequence
  Synthetic
auuauuuuuuguuugcuuuu

SEQ ID NO: 826093 - RNA, 20 nt, Artificial Sequence
  Synthetic
auguuuuaaaagaaucuuuu

SEQ ID NO: 826094 - RNA, 20 nt, Artificial Sequence
  Synthetic
uucuaaugugugaaucuuuu

SEQ ID NO: 826095 - RNA, 20 nt, Artificial Sequence
  Synthetic
uugggaaauaugcaucuuuu

SEQ ID NO: 826096 - RNA, 20 nt, Artificial Sequence
  Synthetic
agagacucacgucaucuuuu

SEQ ID NO: 826097 - RNA, 20 nt, Artificial Sequence
  Synthetic
aucauaauucuucaucuuuu

SEQ ID NO: 826098 - RNA, 20 nt, Artificial Sequence
  Synthetic
cuugugcaugcagaucuuuu

SEQ ID NO: 826099 - RNA, 20 nt, Artificial Sequence
  Synthetic
aggccccaaaacuaucuuuu

SEQ ID NO: 826100 - RNA, 20 nt, Artificial Sequence
  Synthetic
agauaaagcucuuaucuuuu

SEQ ID NO: 826101 - RNA, 20 nt, Artificial Sequence
  Synthetic
aaggaagggauaacucuuuu

SEQ ID NO: 826102 - RNA, 20 nt, Artificial Sequence
  Synthetic
ucacuaagauucacucuuuu

SEQ ID NO: 826103 - RNA, 20 nt, Artificial Sequence
  Synthetic
aucugguccuggacucuuuu

SEQ ID NO: 826104 - RNA, 20 nt, Artificial Sequence
  Synthetic
ccucaucaguguacucuuuu

SEQ ID NO: 826105 - RNA, 20 nt, Artificial Sequence
  Synthetic
ccacuauuaauuccucuuuu

SEQ ID NO: 826106 - RNA, 20 nt, Artificial Sequence
  Synthetic
cuuccuucaggagcucuuuu

SEQ ID NO: 826107 - RNA, 20 nt, Artificial Sequence
  Synthetic
uucccaaaccuugcucuuuu

SEQ ID NO: 826108 - RNA, 20 nt, Artificial Sequence
  Synthetic
auacagucuaaaucucuuuu

SEQ ID NO: 826109 - RNA, 20 nt, Artificial Sequence
  Synthetic
aaauacuacuacucucuuuu

SEQ ID NO: 826110 - RNA, 20 nt, Artificial Sequence
  Synthetic
uuuguuuuuuauucucuuuu

SEQ ID NO: 826111 - RNA, 20 nt, Artificial Sequence
  Synthetic
aacauaaugacuucucuuuu

SEQ ID NO: 826112 - RNA, 20 nt, Artificial Sequence
  Synthetic
uuuugccaauguucucuuuu

SEQ ID NO: 826113 - RNA, 20 nt, Artificial Sequence
  Synthetic
aggucacugaaaagucuuuu

SEQ ID NO: 826114 - RNA, 20 nt, Artificial Sequence
  Synthetic
agaauucauacuagucuuuu

SEQ ID NO: 826115 - RNA, 20 nt, Artificial Sequence
  Synthetic
accacaccguuaggucuuuu

SEQ ID NO: 826116 - RNA, 20 nt, Artificial Sequence
  Synthetic
auuugguccuugggucuuuu

SEQ ID NO: 826117 - RNA, 20 nt, Artificial Sequence
  Synthetic
aauuguacuuuuggucuuuu

SEQ ID NO: 826118 - RNA, 20 nt, Artificial Sequence
  Synthetic
aggcuuuuaguaugucuuuu

SEQ ID NO: 826119 - RNA, 20 nt, Artificial Sequence
  Synthetic
uacaagugcaugugucuuuu

SEQ ID NO: 826120 - RNA, 20 nt, Artificial Sequence
  Synthetic
ugugagugcaugugucuuuu

SEQ ID NO: 826121 - RNA, 20 nt, Artificial Sequence
  Synthetic
uuuuuguuuuguugucuuuu

SEQ ID NO: 826122 - RNA, 20 nt, Artificial Sequence
  Synthetic
uuucuaagcuuuugucuuuu

SEQ ID NO: 826123 - RNA, 20 nt, Artificial Sequence
  Synthetic
auaaucauuugcauucuuuu

SEQ ID NO: 826124 - RNA, 20 nt, Artificial Sequence
  Synthetic
aguuuccuacaucuucuuuu

SEQ ID NO: 826125 - RNA, 20 nt, Artificial Sequence
  Synthetic
uaagugcuuauuguucuuuu

SEQ ID NO: 826126 - RNA, 20 nt, Artificial Sequence
  Synthetic
agaaaauuuaacuuucuuuu

SEQ ID NO: 826127 - RNA, 20 nt, Artificial Sequence
  Synthetic
aacaucaaaugcuuucuuuu

SEQ ID NO: 826128 - RNA, 20 nt, Artificial Sequence
  Synthetic
ccccagacauucuuucuuuu

SEQ ID NO: 826129 - RNA, 20 nt, Artificial Sequence
  Synthetic
auuacuuaaaauuuucuuuu

SEQ ID NO: 826130 - RNA, 20 nt, Artificial Sequence
  Synthetic
cuuuuguccaauuuucuuuu

SEQ ID NO: 826131 - RNA, 20 nt, Artificial Sequence
  Synthetic
cuccugacuuauuuucuuuu

SEQ ID NO: 826132 - RNA, 20 nt, Artificial Sequence
  Synthetic
auacugauuuauuuucuuuu

SEQ ID NO: 826133 - RNA, 20 nt, Artificial Sequence
  Synthetic
acccaccugucuuuucuuuu

SEQ ID NO: 826134 - RNA, 20 nt, Artificial Sequence
  Synthetic
agcacgugauuuuuucuuuu

SEQ ID NO: 826135 - RNA, 20 nt, Artificial Sequence
  Synthetic
cugacucuucuaaaaguuuu

SEQ ID NO: 826136 - RNA, 20 nt, Artificial Sequence
  Synthetic
aauaucugaaacaaaguuuu

SEQ ID NO: 826137 - RNA, 20 nt, Artificial Sequence
  Synthetic
uuuuacauuuaacaaguuuu

SEQ ID NO: 826138 - RNA, 20 nt, Artificial Sequence
  Synthetic
uacugaagccaugaaguuuu

SEQ ID NO: 826139 - RNA, 20 nt, Artificial Sequence
  Synthetic
aaacuauucagugaaguuuu

SEQ ID NO: 826140 - RNA, 20 nt, Artificial Sequence
  Synthetic
auuuuaagucaauaaguuuu

SEQ ID NO: 826141 - RNA, 20 nt, Artificial Sequence
  Synthetic
agaauguaaauauaaguuuu

SEQ ID NO: 826142 - RNA, 20 nt, Artificial Sequence
  Synthetic
uuuauuauacucuaaguuuu

SEQ ID NO: 826143 - RNA, 20 nt, Artificial Sequence
  Synthetic
auuuuacaccuguaaguuuu

SEQ ID NO: 826144 - RNA, 20 nt, Artificial Sequence
  Synthetic
uuaauuauacuuuaaguuuu

SEQ ID NO: 826145 - RNA, 20 nt, Artificial Sequence
  Synthetic
auuauuauacuuuaaguuuu

SEQ ID NO: 826146 - RNA, 20 nt, Artificial Sequence
  Synthetic
uuuauuauacuuuaaguuuu

SEQ ID NO: 826147 - RNA, 20 nt, Artificial Sequence
  Synthetic
uuuauucuacuuuaaguuuu

SEQ ID NO: 826148 - RNA, 20 nt, Artificial Sequence
  Synthetic
auuauuguacuuuaaguuuu

SEQ ID NO: 826149 - RNA, 20 nt, Artificial Sequence
  Synthetic
aaaauuauuuacccaguuuu

SEQ ID NO: 826150 - RNA, 20 nt, Artificial Sequence
  Synthetic
ucuggguucuuuccaguuuu

SEQ ID NO: 826151 - RNA, 20 nt, Artificial Sequence
  Synthetic
uaauagcuuuaagcaguuuu

SEQ ID NO: 826152 - RNA, 20 nt, Artificial Sequence
  Synthetic
ugaucacuguuggcaguuuu

SEQ ID NO: 826153 - RNA, 20 nt, Artificial Sequence
  Synthetic
auggaauuuauaucaguuuu

SEQ ID NO: 826154 - RNA, 20 nt, Artificial Sequence
  Synthetic
uguuucuucugcucaguuuu

SEQ ID NO: 826155 - RNA, 20 nt, Artificial Sequence
  Synthetic
agccuucagcucucaguuuu

SEQ ID NO: 826156 - RNA, 20 nt, Artificial Sequence
  Synthetic
uucaggugguuuucaguuuu

SEQ ID NO: 826157 - RNA, 20 nt, Artificial Sequence
  Synthetic
uuaucagcuuaaagaguuuu

SEQ ID NO: 826158 - RNA, 20 nt, Artificial Sequence
  Synthetic
aaaacaaaaaacagaguuuu

SEQ ID NO: 826159 - RNA, 20 nt, Artificial Sequence
  Synthetic
uguaaauugcucagaguuuu

SEQ ID NO: 826160 - RNA, 20 nt, Artificial Sequence
  Synthetic
agguacccaauaauaguuuu

SEQ ID NO: 826161 - RNA, 20 nt, Artificial Sequence
  Synthetic
ugggguucugucauaguuuu

SEQ ID NO: 826162 - RNA, 20 nt, Artificial Sequence
  Synthetic
acaaccaaaaagauaguuuu

SEQ ID NO: 826163 - RNA, 20 nt, Artificial Sequence
  Synthetic
ucuagaaaucuuauaguuuu

SEQ ID NO: 826164 - RNA, 20 nt, Artificial Sequence
  Synthetic
aaggucacacaccuaguuuu

SEQ ID NO: 826165 - RNA, 20 nt, Artificial Sequence
  Synthetic
caccacgcccagcuaguuuu

SEQ ID NO: 826166 - RNA, 20 nt, Artificial Sequence
  Synthetic
auuugagcucaaguaguuuu

SEQ ID NO: 826167 - RNA, 20 nt, Artificial Sequence
  Synthetic
uuuauaauuucaguaguuuu

SEQ ID NO: 826168 - RNA, 20 nt, Artificial Sequence
  Synthetic
cugggccuccauguaguuuu

SEQ ID NO: 826169 - RNA, 20 nt, Artificial Sequence
  Synthetic
ugccuuuggauuuuaguuuu

SEQ ID NO: 826170 - RNA, 20 nt, Artificial Sequence
  Synthetic
acuuucaugguuuuaguuuu

SEQ ID NO: 826171 - RNA, 20 nt, Artificial Sequence
  Synthetic
ccuauuaguaguuacguuuu

SEQ ID NO: 826172 - RNA, 20 nt, Artificial Sequence
  Synthetic
accuguaaucucagcguuuu

SEQ ID NO: 826173 - RNA, 20 nt, Artificial Sequence
  Synthetic
cuucuaacaguuggcguuuu

SEQ ID NO: 826174 - RNA, 20 nt, Artificial Sequence
  Synthetic
uagguguguggauucguuuu

SEQ ID NO: 826175 - RNA, 20 nt, Artificial Sequence
  Synthetic
uggcaauaugacaagguuuu

SEQ ID NO: 826176 - RNA, 20 nt, Artificial Sequence
  Synthetic
uagaagaaguuacagguuuu

SEQ ID NO: 826177 - RNA, 20 nt, Artificial Sequence
  Synthetic
acauuuggauuucagguuuu

SEQ ID NO: 826178 - RNA, 20 nt, Artificial Sequence
  Synthetic
aguuuuugauuucagguuuu

SEQ ID NO: 826179 - RNA, 20 nt, Artificial Sequence
  Synthetic
aaaaaugcacacuagguuuu

SEQ ID NO: 826180 - RNA, 20 nt, Artificial Sequence
  Synthetic
auuacuauguguuagguuuu

SEQ ID NO: 826181 - RNA, 20 nt, Artificial Sequence
  Synthetic
agaagaggcguuccgguuuu

SEQ ID NO: 826182 - RNA, 20 nt, Artificial Sequence
  Synthetic
uuuugaugguuuucgguuuu

SEQ ID NO: 826183 - RNA, 20 nt, Artificial Sequence
  Synthetic
ugucguuuugaaaggguuuu

SEQ ID NO: 826184 - RNA, 20 nt, Artificial Sequence
  Synthetic
auccagaaacacaggguuuu

SEQ ID NO: 826185 - RNA, 20 nt, Artificial Sequence
  Synthetic
uucaacucagcaaugguuuu

SEQ ID NO: 826186 - RNA, 20 nt, Artificial Sequence
  Synthetic
aggaaaguacuaaugguuuu

SEQ ID NO: 826187 - RNA, 20 nt, Artificial Sequence
  Synthetic
acagucuaguacaugguuuu

SEQ ID NO: 826188 - RNA, 20 nt, Artificial Sequence
  Synthetic
ucuaggguuuugaugguuuu

SEQ ID NO: 826189 - RNA, 20 nt, Artificial Sequence
  Synthetic
aggggcaccaauaugguuuu

SEQ ID NO: 826190 - RNA, 20 nt, Artificial Sequence
  Synthetic
uucuaggguuuuaugguuuu

SEQ ID NO: 826191 - RNA, 20 nt, Artificial Sequence
  Synthetic
ucuaggguuuuuaugguuuu

SEQ ID NO: 826192 - RNA, 20 nt, Artificial Sequence
  Synthetic
uuggggguauaggugguuuu

SEQ ID NO: 826193 - RNA, 20 nt, Artificial Sequence
  Synthetic
caaagauaaguugugguuuu

SEQ ID NO: 826194 - RNA, 20 nt, Artificial Sequence
  Synthetic
uuuugccuaaucuugguuuu

SEQ ID NO: 826195 - RNA, 20 nt, Artificial Sequence
  Synthetic
ucugcuugccaguugguuuu

SEQ ID NO: 826196 - RNA, 20 nt, Artificial Sequence
  Synthetic
accaugcaguguuugguuuu

SEQ ID NO: 826197 - RNA, 20 nt, Artificial Sequence
  Synthetic
agaguuauauaaaauguuuu

SEQ ID NO: 826198 - RNA, 20 nt, Artificial Sequence
  Synthetic
aaagugagaacaaauguuuu

SEQ ID NO: 826199 - RNA, 20 nt, Artificial Sequence
  Synthetic
uguuaaaaugacaauguuuu

SEQ ID NO: 826200 - RNA, 20 nt, Artificial Sequence
  Synthetic
cuccauauuuggaauguuuu

SEQ ID NO: 826201 - RNA, 20 nt, Artificial Sequence
  Synthetic
uuuuccuaaaauaauguuuu

SEQ ID NO: 826202 - RNA, 20 nt, Artificial Sequence
  Synthetic
aguucuaaagaacauguuuu

SEQ ID NO: 826203 - RNA, 20 nt, Artificial Sequence
  Synthetic
uucccaauccuucauguuuu

SEQ ID NO: 826204 - RNA, 20 nt, Artificial Sequence
  Synthetic
aaauaggaauaagauguuuu

SEQ ID NO: 826205 - RNA, 20 nt, Artificial Sequence
  Synthetic
uucauaauuauagauguuuu

SEQ ID NO: 826206 - RNA, 20 nt, Artificial Sequence
  Synthetic
uacaaccuaagcuauguuuu

SEQ ID NO: 826207 - RNA, 20 nt, Artificial Sequence
  Synthetic
cucccugacaucuauguuuu

SEQ ID NO: 826208 - RNA, 20 nt, Artificial Sequence
  Synthetic
uaguuugacucuuauguuuu

SEQ ID NO: 826209 - RNA, 20 nt, Artificial Sequence
  Synthetic
agaauguuugcgacuguuuu

SEQ ID NO: 826210 - RNA, 20 nt, Artificial Sequence
  Synthetic
caucacuauuuuacuguuuu

SEQ ID NO: 826211 - RNA, 20 nt, Artificial Sequence
  Synthetic
cuacucaacucugcuguuuu

SEQ ID NO: 826212 - RNA, 20 nt, Artificial Sequence
  Synthetic
ucugugguuuuaucuguuuu

SEQ ID NO: 826213 - RNA, 20 nt, Artificial Sequence
  Synthetic
uauccucacaagucuguuuu

SEQ ID NO: 826214 - RNA, 20 nt, Artificial Sequence
  Synthetic
cauuugcaugggucuguuuu

SEQ ID NO: 826215 - RNA, 20 nt, Artificial Sequence
  Synthetic
cgacccuccuggucuguuuu

SEQ ID NO: 826216 - RNA, 20 nt, Artificial Sequence
  Synthetic
aggcuacaucaagguguuuu

SEQ ID NO: 826217 - RNA, 20 nt, Artificial Sequence
  Synthetic
acuuaguagcuggguguuuu

SEQ ID NO: 826218 - RNA, 20 nt, Artificial Sequence
  Synthetic
cuagguccuuuggguguuuu

SEQ ID NO: 826219 - RNA, 20 nt, Artificial Sequence
  Synthetic
uaaucuauuuaauguguuuu

SEQ ID NO: 826220 - RNA, 20 nt, Artificial Sequence
  Synthetic
auauaucaucgauguguuuu

SEQ ID NO: 826221 - RNA, 20 nt, Artificial Sequence
  Synthetic
acucuagauuucuguguuuu

SEQ ID NO: 826222 - RNA, 20 nt, Artificial Sequence
  Synthetic
aaauagauacaaauuguuuu

SEQ ID NO: 826223 - RNA, 20 nt, Artificial Sequence
  Synthetic
aaaaucagguuaauuguuuu

SEQ ID NO: 826224 - RNA, 20 nt, Artificial Sequence
  Synthetic
cuacccaccaggauuguuuu

SEQ ID NO: 826225 - RNA, 20 nt, Artificial Sequence
  Synthetic
ugacuacguaggauuguuuu

SEQ ID NO: 826226 - RNA, 20 nt, Artificial Sequence
  Synthetic
ugucaggagucacuuguuuu

SEQ ID NO: 826227 - RNA, 20 nt, Artificial Sequence
  Synthetic
cauuucuuaucucuuguuuu

SEQ ID NO: 826228 - RNA, 20 nt, Artificial Sequence
  Synthetic
uaaucaauuuguguuguuuu

SEQ ID NO: 826229 - RNA, 20 nt, Artificial Sequence
  Synthetic
aagaauauucccuuuguuuu

SEQ ID NO: 826230 - RNA, 20 nt, Artificial Sequence
  Synthetic
augauuugauauuuuguuuu

SEQ ID NO: 826231 - RNA, 20 nt, Artificial Sequence
  Synthetic
uuagaagaauugcaauuuuu

SEQ ID NO: 826232 - RNA, 20 nt, Artificial Sequence
  Synthetic
uccucaauuugucaauuuuu

SEQ ID NO: 826233 - RNA, 20 nt, Artificial Sequence
  Synthetic
cuggggguuugagaauuuuu

SEQ ID NO: 826234 - RNA, 20 nt, Artificial Sequence
  Synthetic
aucaauaaaugugaauuuuu

SEQ ID NO: 826235 - RNA, 20 nt, Artificial Sequence
  Synthetic
uaaucauaauaauaauuuuu

SEQ ID NO: 826236 - RNA, 20 nt, Artificial Sequence
  Synthetic
uuauuuauaagauaauuuuu

SEQ ID NO: 826237 - RNA, 20 nt, Artificial Sequence
  Synthetic
uuuggcaacauauaauuuuu

SEQ ID NO: 826238 - RNA, 20 nt, Artificial Sequence
  Synthetic
ucccugccucccuaauuuuu

SEQ ID NO: 826239 - RNA, 20 nt, Artificial Sequence
  Synthetic
ucacauauucuuuaauuuuu

SEQ ID NO: 826240 - RNA, 20 nt, Artificial Sequence
  Synthetic
uuuuuuuauuuuuaauuuuu

SEQ ID NO: 826241 - RNA, 20 nt, Artificial Sequence
  Synthetic
aaacuaaugcuaacauuuuu

SEQ ID NO: 826242 - RNA, 20 nt, Artificial Sequence
  Synthetic
cccauuuaauacacauuuuu

SEQ ID NO: 826243 - RNA, 20 nt, Artificial Sequence
  Synthetic
aaaguugcuuccacauuuuu

SEQ ID NO: 826244 - RNA, 20 nt, Artificial Sequence
  Synthetic
ugcaaaauaccuccauuuuu

SEQ ID NO: 826245 - RNA, 20 nt, Artificial Sequence
  Synthetic
accacuuauguagcauuuuu

SEQ ID NO: 826246 - RNA, 20 nt, Artificial Sequence
  Synthetic
uguccuucaagaagauuuuu

SEQ ID NO: 826247 - RNA, 20 nt, Artificial Sequence
  Synthetic
uaugcugaaauaagauuuuu

SEQ ID NO: 826248 - RNA, 20 nt, Artificial Sequence
  Synthetic
cuaaucuguuuaagauuuuu

SEQ ID NO: 826249 - RNA, 20 nt, Artificial Sequence
  Synthetic
acaucuggcagcagauuuuu

SEQ ID NO: 826250 - RNA, 20 nt, Artificial Sequence
  Synthetic
aaaauuuauaauagauuuuu

SEQ ID NO: 826251 - RNA, 20 nt, Artificial Sequence
  Synthetic
uacauauuuuguagauuuuu

SEQ ID NO: 826252 - RNA, 20 nt, Artificial Sequence
  Synthetic
cuucucaauggaggauuuuu

SEQ ID NO: 826253 - RNA, 20 nt, Artificial Sequence
  Synthetic
acauguuuugaaugauuuuu

SEQ ID NO: 826254 - RNA, 20 nt, Artificial Sequence
  Synthetic
acuuggccugagugauuuuu

SEQ ID NO: 826255 - RNA, 20 nt, Artificial Sequence
  Synthetic
ccuuuagggaggugauuuuu

SEQ ID NO: 826256 - RNA, 20 nt, Artificial Sequence
  Synthetic
ugaugucguucuugauuuuu

SEQ ID NO: 826257 - RNA, 20 nt, Artificial Sequence
  Synthetic
uaucaauugucaauauuuuu

SEQ ID NO: 826258 - RNA, 20 nt, Artificial Sequence
  Synthetic
cuuaugagcuacauauuuuu

SEQ ID NO: 826259 - RNA, 20 nt, Artificial Sequence
  Synthetic
cuuucuugccucauauuuuu

SEQ ID NO: 826260 - RNA, 20 nt, Artificial Sequence
  Synthetic
aauuaaaaaaauauauuuuu

SEQ ID NO: 826261 - RNA, 20 nt, Artificial Sequence
  Synthetic
aagcauugguaacuauuuuu

SEQ ID NO: 826262 - RNA, 20 nt, Artificial Sequence
  Synthetic
caaaauuuguuacuauuuuu

SEQ ID NO: 826263 - RNA, 20 nt, Artificial Sequence
  Synthetic
uuccuuucucuucuauuuuu

SEQ ID NO: 826264 - RNA, 20 nt, Artificial Sequence
  Synthetic
uaauaauagcuaguauuuuu

SEQ ID NO: 826265 - RNA, 20 nt, Artificial Sequence
  Synthetic
aguccaaauuguguauuuuu

SEQ ID NO: 826266 - RNA, 20 nt, Artificial Sequence
  Synthetic
uauauauuuuguguauuuuu

SEQ ID NO: 826267 - RNA, 20 nt, Artificial Sequence
  Synthetic
augucaaagcaauuauuuuu

SEQ ID NO: 826268 - RNA, 20 nt, Artificial Sequence
  Synthetic
aaguaaagagaauuauuuuu

SEQ ID NO: 826269 - RNA, 20 nt, Artificial Sequence
  Synthetic
uuaagugcaacauuauuuuu

SEQ ID NO: 826270 - RNA, 20 nt, Artificial Sequence
  Synthetic
agauaaaagagcuuauuuuu

SEQ ID NO: 826271 - RNA, 20 nt, Artificial Sequence
  Synthetic
uuaauuuauagguuauuuuu

SEQ ID NO: 826272 - RNA, 20 nt, Artificial Sequence
  Synthetic
auaaauucaauuuuauuuuu

SEQ ID NO: 826273 - RNA, 20 nt, Artificial Sequence
  Synthetic
uuuuuuuauuuuuuauuuuu

SEQ ID NO: 826274 - RNA, 20 nt, Artificial Sequence
  Synthetic
agauuacuaguuaacuuuuu

SEQ ID NO: 826275 - RNA, 20 nt, Artificial Sequence
  Synthetic
ucuugaaauugacacuuuuu

SEQ ID NO: 826276 - RNA, 20 nt, Artificial Sequence
  Synthetic
agaggcauuagugacuuuuu

SEQ ID NO: 826277 - RNA, 20 nt, Artificial Sequence
  Synthetic
uguuuugauuaaaccuuuuu

SEQ ID NO: 826278 - RNA, 20 nt, Artificial Sequence
  Synthetic
acuggcaaauccaccuuuuu

SEQ ID NO: 826279 - RNA, 20 nt, Artificial Sequence
  Synthetic
ugacaaauuuucaccuuuuu

SEQ ID NO: 826280 - RNA, 20 nt, Artificial Sequence
  Synthetic
ucccugagagauaccuuuuu

SEQ ID NO: 826281 - RNA, 20 nt, Artificial Sequence
  Synthetic
cuguugcucucgcccuuuuu

SEQ ID NO: 826282 - RNA, 20 nt, Artificial Sequence
  Synthetic
uggcuauaugggcccuuuuu

SEQ ID NO: 826283 - RNA, 20 nt, Artificial Sequence
  Synthetic
auuaaaugacaucccuuuuu

SEQ ID NO: 826284 - RNA, 20 nt, Artificial Sequence
  Synthetic
ugaccaucuacucccuuuuu

SEQ ID NO: 826285 - RNA, 20 nt, Artificial Sequence
  Synthetic
ucuuucaaacaggccuuuuu

SEQ ID NO: 826286 - RNA, 20 nt, Artificial Sequence
  Synthetic
ugaauuuccaaauccuuuuu

SEQ ID NO: 826287 - RNA, 20 nt, Artificial Sequence
  Synthetic
ucugccaggaaauccuuuuu

SEQ ID NO: 826288 - RNA, 20 nt, Artificial Sequence
  Synthetic
ucaagcaagcccuccuuuuu

SEQ ID NO: 826289 - RNA, 20 nt, Artificial Sequence
  Synthetic
cuaccgucucccuccuuuuu

SEQ ID NO: 826290 - RNA, 20 nt, Artificial Sequence
  Synthetic
uauccuuuuauuuccuuuuu

SEQ ID NO: 826291 - RNA, 20 nt, Artificial Sequence
  Synthetic
cuuagauuacccagcuuuuu

SEQ ID NO: 826292 - RNA, 20 nt, Artificial Sequence
  Synthetic
uucuguaacuauagcuuuuu

SEQ ID NO: 826293 - RNA, 20 nt, Artificial Sequence
  Synthetic
uuucugcauucuagcuuuuu

SEQ ID NO: 826294 - RNA, 20 nt, Artificial Sequence
  Synthetic
auuaagaaaauacgcuuuuu

SEQ ID NO: 826295 - RNA, 20 nt, Artificial Sequence
  Synthetic
cauguggcagguggcuuuuu

SEQ ID NO: 826296 - RNA, 20 nt, Artificial Sequence
  Synthetic
uccuagcaccuccucuuuuu

SEQ ID NO: 826297 - RNA, 20 nt, Artificial Sequence
  Synthetic
uggcuauacaagcucuuuuu

SEQ ID NO: 826298 - RNA, 20 nt, Artificial Sequence
  Synthetic
cccaaaggggagcucuuuuu

SEQ ID NO: 826299 - RNA, 20 nt, Artificial Sequence
  Synthetic
uggcgaugcgggcucuuuuu

SEQ ID NO: 826300 - RNA, 20 nt, Artificial Sequence
  Synthetic
uggcaaugugggcucuuuuu

SEQ ID NO: 826301 - RNA, 20 nt, Artificial Sequence
  Synthetic
uggcgaugugggcucuuuuu

SEQ ID NO: 826302 - RNA, 20 nt, Artificial Sequence
  Synthetic
uggcuaugugggcucuuuuu

SEQ ID NO: 826303 - RNA, 20 nt, Artificial Sequence
  Synthetic
uggucuaaaauucucuuuuu

SEQ ID NO: 826304 - RNA, 20 nt, Artificial Sequence
  Synthetic
cauuuuucaagagucuuuuu

SEQ ID NO: 826305 - RNA, 20 nt, Artificial Sequence
  Synthetic
caucuuaucauauucuuuuu

SEQ ID NO: 826306 - RNA, 20 nt, Artificial Sequence
  Synthetic
accuuucucugcuucuuuuu

SEQ ID NO: 826307 - RNA, 20 nt, Artificial Sequence
  Synthetic
agaugauuuucuuucuuuuu

SEQ ID NO: 826308 - RNA, 20 nt, Artificial Sequence
  Synthetic
accuggaaguguuucuuuuu

SEQ ID NO: 826309 - RNA, 20 nt, Artificial Sequence
  Synthetic
uuuaugucccuuuucuuuuu

SEQ ID NO: 826310 - RNA, 20 nt, Artificial Sequence
  Synthetic
caauuuuuuuuuuucuuuuu

SEQ ID NO: 826311 - RNA, 20 nt, Artificial Sequence
  Synthetic
uuuacauuuaacaaguuuuu

SEQ ID NO: 826312 - RNA, 20 nt, Artificial Sequence
  Synthetic
uaucagcuuaaagaguuuuu

SEQ ID NO: 826313 - RNA, 20 nt, Artificial Sequence
  Synthetic
ccuacuaaaucagaguuuuu

SEQ ID NO: 826314 - RNA, 20 nt, Artificial Sequence
  Synthetic
uuucagcuuuuagaguuuuu

SEQ ID NO: 826315 - RNA, 20 nt, Artificial Sequence
  Synthetic
aggcauguacauuaguuuuu

SEQ ID NO: 826316 - RNA, 20 nt, Artificial Sequence
  Synthetic
acaagaacauaagcguuuuu

SEQ ID NO: 826317 - RNA, 20 nt, Artificial Sequence
  Synthetic
agguguguggauucguuuuu

SEQ ID NO: 826318 - RNA, 20 nt, Artificial Sequence
  Synthetic
uuuccuaaaauaauguuuuu

SEQ ID NO: 826319 - RNA, 20 nt, Artificial Sequence
  Synthetic
auuauuacucucauguuuuu

SEQ ID NO: 826320 - RNA, 20 nt, Artificial Sequence
  Synthetic
cacacugaaaaacuguuuuu

SEQ ID NO: 826321 - RNA, 20 nt, Artificial Sequence
  Synthetic
uucacuucuucgcuguuuuu

SEQ ID NO: 826322 - RNA, 20 nt, Artificial Sequence
  Synthetic
augaauaaacugcuguuuuu

SEQ ID NO: 826323 - RNA, 20 nt, Artificial Sequence
  Synthetic
cugugguuuuaucuguuuuu

SEQ ID NO: 826324 - RNA, 20 nt, Artificial Sequence
  Synthetic
auuugcaugggucuguuuuu

SEQ ID NO: 826325 - RNA, 20 nt, Artificial Sequence
  Synthetic
augaagagauauguguuuuu

SEQ ID NO: 826326 - RNA, 20 nt, Artificial Sequence
  Synthetic
cuuaaagguaauuuguuuuu

SEQ ID NO: 826327 - RNA, 20 nt, Artificial Sequence
  Synthetic
agugaggccacuuuguuuuu

SEQ ID NO: 826328 - RNA, 20 nt, Artificial Sequence
  Synthetic
uauuuuuuaaaaaauuuuuu

SEQ ID NO: 826329 - RNA, 20 nt, Artificial Sequence
  Synthetic
uuguuuagaugaaauuuuuu

SEQ ID NO: 826330 - RNA, 20 nt, Artificial Sequence
  Synthetic
cuaaccuugaauaauuuuuu

SEQ ID NO: 826331 - RNA, 20 nt, Artificial Sequence
  Synthetic
agacuccauuuuaauuuuuu

SEQ ID NO: 826332 - RNA, 20 nt, Artificial Sequence
  Synthetic
uuuuuuauuuuuaauuuuuu

SEQ ID NO: 826333 - RNA, 20 nt, Artificial Sequence
  Synthetic
caacugugcauacauuuuuu

SEQ ID NO: 826334 - RNA, 20 nt, Artificial Sequence
  Synthetic
ucguuuccuuuuuauuuuuu

SEQ ID NO: 826335 - RNA, 20 nt, Artificial Sequence
  Synthetic
ucucucaugagaacuuuuuu

SEQ ID NO: 826336 - RNA, 20 nt, Artificial Sequence
  Synthetic
aauaacuuuuuaacuuuuuu

SEQ ID NO: 826337 - RNA, 20 nt, Artificial Sequence
  Synthetic
uuuacuuuuuguacuuuuuu

SEQ ID NO: 826338 - RNA, 20 nt, Artificial Sequence
  Synthetic
agauggacaggcccuuuuuu

SEQ ID NO: 826339 - RNA, 20 nt, Artificial Sequence
  Synthetic
cauuauuuuguuccuuuuuu

SEQ ID NO: 826340 - RNA, 20 nt, Artificial Sequence
  Synthetic
uuauucuacuuuccuuuuuu

SEQ ID NO: 826341 - RNA, 20 nt, Artificial Sequence
  Synthetic
aucuguuccugggcuuuuuu

SEQ ID NO: 826342 - RNA, 20 nt, Artificial Sequence
  Synthetic
uauuuggguuuggcuuuuuu

SEQ ID NO: 826343 - RNA, 20 nt, Artificial Sequence
  Synthetic
aauuauuucuuugcuuuuuu

SEQ ID NO: 826344 - RNA, 20 nt, Artificial Sequence
  Synthetic
auucacuuuaagucuuuuuu

SEQ ID NO: 826345 - RNA, 20 nt, Artificial Sequence
  Synthetic
uuuuuuucugauucuuuuuu

SEQ ID NO: 826346 - RNA, 20 nt, Artificial Sequence
  Synthetic
uuucuuuucuuuucuuuuuu

SEQ ID NO: 826347 - RNA, 20 nt, Artificial Sequence
  Synthetic
uacccuauuaaaaguuuuuu

SEQ ID NO: 826348 - RNA, 20 nt, Artificial Sequence
  Synthetic
aaucuaguagggcguuuuuu

SEQ ID NO: 826349 - RNA, 20 nt, Artificial Sequence
  Synthetic
agauaaucaugugguuuuuu

SEQ ID NO: 826350 - RNA, 20 nt, Artificial Sequence
  Synthetic
uguuucuguuuuuguuuuuu

SEQ ID NO: 826351 - RNA, 20 nt, Artificial Sequence
  Synthetic
ccauuaaugaacauuuuuuu

SEQ ID NO: 826352 - RNA, 20 nt, Artificial Sequence
  Synthetic
auuagagcagugauuuuuuu

SEQ ID NO: 826353 - RNA, 20 nt, Artificial Sequence
  Synthetic
cuuaaaaguuauauuuuuuu

SEQ ID NO: 826354 - RNA, 20 nt, Artificial Sequence
  Synthetic
ucugguccuggacuuuuuuu

SEQ ID NO: 826355 - RNA, 20 nt, Artificial Sequence
  Synthetic
uauucuacuuuccuuuuuuu

SEQ ID NO: 826356 - RNA, 20 nt, Artificial Sequence
  Synthetic
aguuuaucaacauuuuuuuu

SEQ ID NO: 826357 - RNA, 20 nt, Artificial Sequence
  Synthetic
ugauuguuaccauuuuuuuu

SEQ ID NO: 826358 - RNA, 20 nt, Artificial Sequence
  Synthetic
uuugguaauucuuuuuuuuu

SEQ ID NO: 826359 - RNA, 20 nt, Artificial Sequence
  Synthetic
ucuguauauaguuuuuuuuu

SEQ ID NO: 826360 - RNA, 20 nt, Artificial Sequence
  Synthetic
uuacaaaaccuuuuuuuuuu

SEQ ID NO: 826361 - RNA, 20 nt, Artificial Sequence
  Synthetic
uguuucuuuguuuuuuuuuu

SEQ ID NO: 826362 - RNA, 20 nt, Artificial Sequence
  Synthetic
uaaauaaacuuuuuuuuuuu

SEQ ID NO: 826363 - RNA, 20 nt, Artificial Sequence
  Synthetic
agacuuuuuuuuuuuuuuuu

SEQ ID NO: 826364 - RNA, 20 nt, Artificial Sequence
  Synthetic
uucuuuuuuuuuuuuuuuuu

SEQ ID NO: 826365 - RNA, 20 nt, Artificial Sequence
  Synthetic
cuuuuuuuuuuuuuuuuuuu

SEQ ID NO: 826366 - RNA, 20 nt, Artificial Sequence
  Synthetic
uuuuuuuuuuuuuuuuuuuu

SEQ ID NO: 826367 - DNA, 3255 bp, Staphylococcus aureus
atggccccaaagaagaagcggaaggtcggtatccacggagtcccagcagccaagcggaactacatcctgggcctggacatcggcatcaccagcgtgggctacggcatcatcgactacgagacacgggacgtgatcgatgccggcgtgcggctgttcaaagaggccaacgtggaaaacaacgagggcaggcggagcaagagaggcgccagaaggctgaagcggcggaggcggcatagaatccagagagtgaagaagctgctgttcgactacaacctgctgaccgaccacagcgagctgagcggcatcaacccctacgaggccagagtgaagggcctgagccagaagctgagcgaggaagagttctctgccgccctgctgcacctggccaagagaagaggcgtgcacaacgtgaacgaggtggaagaggacaccggcaacgagctgtccaccagagagcagatcagccggaacagcaaggccctggaagagaaatacgtggccgaactgcagctggaacggctgaagaaagacggcgaagtgcggggcagcatcaacagattcaagaccagcgactacgtgaaagaagccaaacagctgctgaaggtgcagaaggcctaccaccagctggaccagagcttcatcgacacctacatcgacctgctggaaacccggcggacctactatgagggacctggcgagggcagccccttcggctggaaggacatcaaagaatggtacgagatgctgatgggccactgcacctacttccccgaggaactgcggagcgtgaagtacgcctacaacgccgacctgtacaacgccctgaacgacctgaacaatctcgtgatcaccagggacgagaacgagaagctggaatattacgagaagttccagatcatcgagaacgtgttcaagcagaagaagaagcccaccctgaagcagatcgccaaagaaatcctcgtgaacgaagaggatattaagggctacagagtgaccagcaccggcaagcccgagttcaccaacctgaaggtgtaccacgacatcaaggacattaccgcccggaaagagattattgagaacgccgagctgctggatcagattgccaagatcctgaccatctaccagagcagcgaggacatccaggaagaactgaccaatctgaactccgagctgacccaggaagagatcgagcagatctctaatctgaagggctataccggcacccacaacctgagcctgaaggccatcaacctgatcctggacgagctgtggcacaccaacgacaaccagatcgctatcttcaaccggctgaagctggtgcccaagaaggtggacctgtcccagcagaaagagatccccaccaccctggtggacgacttcatcctgagccccgtcgtgaagagaagcttcatccagagcatcaaagtgatcaacgccatcatcaagaagtacggcctgcccaacgacatcattatcgagctggcccgcgagaagaactccaaggacgcccagaaaatgatcaacgagatgcagaagcggaaccggcagaccaacgagcggatcgaggaaatcatccggaccaccggcaaagagaacgccaagtacctgatcgagaagatcaagctgcacgacatgcaggaaggcaagtgcctgtacagcctggaagccatccctctggaagatctgctgaacaaccccttcaactatgaggtggaccacatcatccccagaagcgtgtccttcgacaacagcttcaacaacaaggtgctcgtgaagcaggaagaaaacagcaagaagggcaaccggaccccattccagtacctgagcagcagcgacagcaagatcagctacgaaaccttcaagaagcacatcctgaatctggccaagggcaagggcagaatcagcaagaccaagaaagagtatctgctggaagaacgggacatcaacaggttctccgtgcagaaagacttcatcaaccggaacctggtggataccagatacgccaccagaggcctgatgaacctgctgcggagctacttcagagtgaacaacctggacgtgaaagtgaagtccatcaatggcggcttcaccagctttctgcggcggaagtggaagtttaagaaagagcggaacaaggggtacaagcaccacgccgaggacgccctgatcattgccaacgccgatttcatcttcaaagagtggaagaaactggacaaggccaaaaaagtgatggaaaaccagatgttcgaggaaaggcaggccgagagcatgcccgagatcgaaaccgagcaggagtacaaagagatcttcatcaccccccaccagatcaagcacattaaggacttcaaggactacaagtacagccaccgggtggacaagaagcctaatagagagctgattaacgacaccctgtactccacccggaaggacgacaagggcaacaccctgatcgtgaacaatctgaacggcctgtacgacaaggacaatgacaagctgaaaaagctgatcaacaagagccccgaaaagctgctgatgtaccaccacgacccccagacctaccagaaactgaagctgattatggaacagtacggcgacgagaagaatcccctgtacaagtactacgaggaaaccgggaactacctgaccaagtactccaaaaaggacaacggccccgtgatcaagaagattaagtattacggcaacaaactgaacgcccatctggacatcaccgacgactaccccaacagcagaaacaaggtcgtgaagctgtccctgaagccctacagattcgacgtgtacctggacaatggcgtgtacaagttcgtgaccgtgaagaatctggatgtgatcaaaaaagaaaactactacgaagtgaatagcaagtgctatgaggaagctaagaagctgaagaagatcagcaaccaggccgagtttatcgcctccttctacaacaacgatctgatcaagatcaacggcgagctgtatagagtgatcggcgtgaacaacgacctgctgaaccggatcgaagtgaacatgatcgacatcacctaccgcgagtacctggaaaacatgaacgacaagaggccccccaggatcattaagacaatcgcctccaagacccagagcattaagaagtacagcacagacattctgggcaacctgtatgaagtgaaatctaagaagcaccctcagatcatcaaaaagggcaaaaggccggcggccacgaaaaaggccggccaggcaaaaaagaaaaag

SEQ ID NO: 826368 - DNA, 3242 bp, Staphylococcus aureus
accggtgccaccatgtacccatacgatgttccagattacgcttcgccgaagaaaaagcgcaaggtcgaagcgtccatgaaaaggaactacattctggggctggacatcgggattacaagcgtggggtatgggattattgactatgaaacaagggacgtgatcgacgcaggcgtcagactgttcaaggaggccaacgtggaaaacaatgagggacggagaagcaagaggggagccaggcgcctgaaacgacggagaaggcacagaatccagagggtgaagaaactgctgttcgattacaacctgctgaccgaccattctgagctgagtggaattaatccttatgaagccagggtgaaaggcctgagtcagaagctgtcagaggaagagttttccgcagctctgctgcacctggctaagcgccgaggagtgcataacgtcaatgaggtggaagaggacaccggcaacgagctgtctacaaaggaacagatctcacgcaatagcaaagctctggaagagaagtatgtcgcagagctgcagctggaacggctgaagaaagatggcgaggtgagagggtcaattaataggttcaagacaagcgactacgtcaaagaagccaagcagctgctgaaagtgcagaaggcttaccaccagctggatcagagcttcatcgatacttatatcgacctgctggagactcggagaacctactatgagggaccaggagaagggagccccttcggatggaaagacatcaaggaatggtacgagatgctgatgggacattgcacctattttccagaagagctgagaagcgtcaagtacgcttataacgcagatcttacaacgccctgaatgacctgaacaacctggtcatcaccagggatgaaaacgagaaactggaatactatgagaagttccagatcatcgaaaacgtgtttaagcagaagaaaaagcctacactgaaacagattgctaaggagatcctggtcaacgaagaggacatcaagggctaccgggtgacaagcactggaaaaccagagttcaccaatctgaaagtgtatcacgatattaaggacatcacagcacggaaagaaatcattgagaacgccgaactgctggatcagattgctaagatcctgactatctaccagagctccgaggacatccaggaagagctgactaacctgaacagcgagctgacccaggaagagatcgaacagattagtaatctgaaggggtacaccggaacacacaacctgtccctgaaagctatcaatctgattctggatgagctgtggcatacaaacgacaatcagattgcaatctttaaccggctgaagctggtcccaaaaaaggtggacctgagtcagcagaaagagatcccaaccacactggtggacgatttcattctgtcacccgtggtcaagcggagcttcatccagagcatcaaagtgatcaacgccatcatcaagaagtacggcctgcccaatgatatcattatcgagctggctagggagaagaacagcaaggacgcacagaagatgatcaatgagatgcagaaacgaaaccggcagaccaatgaacgcattgaagagattatccgaactaccgggaaagagaacgcaaagtacctgattgaaaaaatcaagctgcacgatatgcaggagggaaagtgtctgtattctctggaggccatccccctggaggacctgctgaacaatccattcaactacgaggtcgatcatattatccccagaagcgtgtccttcgacaattcctttaacaacaaggtgctggtcaagcaggaagagaactctaaaaagggcaataggactcctttccagtacctgtctagttcagattccaagatctcttacgaaacctttaaaaagcacattctgaatctggccaaaggaaagggccgcatcagcaagaccaaaaaggagtacctgctggaagagcgggacatcaacagattctccgtccagaaggattttattaaccggaatctggtggacacaagatacgctactcgcggcctgatgaatctgctgcgatcctatttccgggtgaacaatctggatgtgaaagtcaagtccatcaacggcgggttcacatcttttctgaggcgcaaatggaagtttaaaaaggagcgcaacaaagggtacaagcaccatgccgaagatgctctgattatcgcaaatgccgacttcatctttaaggagtggaaaaagctggacaaagccaagaaagtgatggagaaccagatgttcgaagagaagcaggccgaatctatgcccgaaatcgagacagaacaggagtacaaggagattttcatcactcctcaccagatcaagcatatcaaggatttcaaggactacaagtactctcaccgggtggataaaaagcccaacagagagctgatcaatgacaccctgtatagtacaagaaaagacgataaggggaataccctgattgtgaacaatctgaacggactgtacgacaaagataatgacaagctgaaaaagctgatcaacaaaagtcccgagaagctgctgatgtaccaccatgatcctcagacatatcagaaactgaagctgattatggagcagtacggcgacgagaagaacccactgtataagtactatgaagagactgggaactacctgaccaagtatagcaaaaaggataatggccccgtgatcaagaagatcaagtactatgggaacaagctgaatgcccatctggacatcacagacgattaccctaacagtcgcaacaaggtggtcaagctgtcactgaagccatacagattcgatgtctatctggacaacggcgtgtataaatttgtgactgtcaagaatctggatgtcatcaaaaaggagaactactatgaagtgaatagcaagtgctacgaagaggctaaaaagctgaaaaagattagcaaccaggcagagttcatcgcctccttttacaacaacgacctgattaagatcaatggcgaactgtatagggtcatcggggtgaacaatgatctgctgaaccgcattgaagtgaatatgattgacatcacttaccgagagtatctggaaaacatgaatgataagcgcccccctcgaattatcaaaacaattgcctctaagactcagagtatcaaaaagtactcaaccgacattctgggaaacctgtatgaggtgaagagcaaaaagcaccctcagattatcaaaaagggctaagaattc

SEQ ID NO: 826369 - DNA, 22 bp, Artificial Sequence
  Synthetic
gaattttcaatgatgttctggg

SEQ ID NO: 826370 - DNA, 22 bp, Artificial Sequence
  Synthetic
gaagccatttcccatgctcctt

SEQ ID NO: 826371 - DNA, 22 bp, Artificial Sequence
  Synthetic
gttcctccagtaacagatttgg

SEQ ID NO: 826372 - DNA, 22 bp, Artificial Sequence
  Synthetic
gagcaagagagagagagggcat

SEQ ID NO: 826373 - DNA, 22 bp, Artificial Sequence
  Synthetic
gctctgaggtgagtaattaata

SEQ ID NO: 826374 - DNA, 22 bp, Artificial Sequence
  Synthetic
gttacttcaatttttggctatt

SEQ ID NO: 826375 - DNA, 22 bp, Artificial Sequence
  Synthetic
ggatcagagtcttctggaaaca

SEQ ID NO: 826376 - DNA, 22 bp, Artificial Sequence
  Synthetic
gactgttacagtagtcttatat

SEQ ID NO: 826377 - DNA, 22 bp, Artificial Sequence
  Synthetic
gaactggtgggaaatggtctag

SEQ ID NO: 826378 - DNA, 22 bp, Artificial Sequence
  Synthetic
gaagttggttaaaataataaaa

SEQ ID NO: 826379 - DNA, 22 bp, Artificial Sequence
  Synthetic
gtgattccatatggctgaagtt

SEQ ID NO: 826380 - DNA, 22 bp, Artificial Sequence
  Synthetic
gactagtgttgctatcaacaaa

SEQ ID NO: 826381 - DNA, 22 bp, Artificial Sequence
  Synthetic
gtgcagtggttgagattttgtg

SEQ ID NO: 826382 - DNA, 22 bp, Artificial Sequence
  Synthetic
gtaggctttgtgataatatgct

SEQ ID NO: 826383 - DNA, 22 bp, Artificial Sequence
  Synthetic
gagtcacagaggcaggaaagta

SEQ ID NO: 826384 - DNA, 21 bp, Artificial Sequence
  Synthetic
gacgcaaatctctatgattct

SEQ ID NO: 826385 - DNA, 27 bp, Artificial Sequence
  Synthetic
gacgcaaatctctatgattctggggat

SEQ ID NO: 826386 - DNA, 21 bp, Artificial Sequence
  Synthetic
gggcacagcatggccttgaac

SEQ ID NO: 826387 - DNA, 27 bp, Artificial Sequence
  Synthetic
gggcacagcatggccttgaacctgagt

SEQ ID NO: 826388 - DNA, 21 bp, Artificial Sequence
  Synthetic
gcatccatggccttgctcaca

SEQ ID NO: 826389 - DNA, 27 bp, Artificial Sequence
  Synthetic
gcatccatggccttgctcacactgggt

SEQ ID NO: 826390 - DNA, 21 bp, Artificial Sequence
  Synthetic
gaggcccctatcctagaccca

SEQ ID NO: 826391 - DNA, 27 bp, Artificial Sequence
  Synthetic
gaggcccctatcctagacccactgaat

SEQ ID NO: 826392 - DNA, 21 bp, Artificial Sequence
  Synthetic
gcacagtcagaactagtgtgc

SEQ ID NO: 826393 - DNA, 27 bp, Artificial Sequence
  Synthetic
gcacagtcagaactagtgtgcttgaat

SEQ ID NO: 826394 - DNA, 21 bp, Artificial Sequence
  Synthetic
gattgcgtcaaagatcaagat

SEQ ID NO: 826395 - DNA, 27 bp, Artificial Sequence
  Synthetic
gattgcgtcaaagatcaagataaggat

SEQ ID NO: 826396 - DNA, 21 bp, Artificial Sequence
  Synthetic
gttccacaggtatttctaact

SEQ ID NO: 826397 - DNA, 27 bp, Artificial Sequence
  Synthetic
gttccacaggtatttctaactcaggat

SEQ ID NO: 826398 - DNA, 21 bp, Artificial Sequence
  Synthetic
gagattaaataacagacctca

SEQ ID NO: 826399 - DNA, 27 bp, Artificial Sequence
  Synthetic
gagattaaataacagacctcaaagaat

SEQ ID NO: 826400 - DNA, 21 bp, Artificial Sequence
  Synthetic
gataatctgaatttagtctaa

SEQ ID NO: 826401 - DNA, 27 bp, Artificial Sequence
  Synthetic
gataatctgaatttagtctaacagaat

SEQ ID NO: 826402 - DNA, 21 bp, Artificial Sequence
  Synthetic
gatcagagtcttctggaaaca

SEQ ID NO: 826403 - DNA, 27 bp, Artificial Sequence
  Synthetic
gatcagagtcttctggaaacaaggagt

SEQ ID NO: 826404 - DNA, 21 bp, Artificial Sequence
  Synthetic
ggatttgtatccattatctgg

SEQ ID NO: 826405 - DNA, 27 bp, Artificial Sequence
  Synthetic
ggatttgtatccattatctgggtgaat

SEQ ID NO: 826406 - DNA, 21 bp, Artificial Sequence
  Synthetic
gaaaaaattggttcactctat

SEQ ID NO: 826407 - DNA, 27 bp, Artificial Sequence
  Synthetic
gaaaaaattggttcactctatttgaat

SEQ ID NO: 826408 - DNA, 21 bp, Artificial Sequence
  Synthetic
gggaggtcaatgtggagataa

SEQ ID NO: 826409 - DNA, 27 bp, Artificial Sequence
  Synthetic
gggaggtcaatgtggagataagagagt

SEQ ID NO: 826410 - DNA, 21 bp, Artificial Sequence
  Synthetic
gatgcaagtggattgagatga

SEQ ID NO: 826411 - DNA, 27 bp, Artificial Sequence
  Synthetic
gatgcaagtggattgagatgaatgagt

SEQ ID NO: 826412 - DNA, 21 bp, Artificial Sequence
  Synthetic
gtcaggttggagatatttctc

SEQ ID NO: 826413 - DNA, 27 bp, Artificial Sequence
  Synthetic
gtcaggttggagatatttctcaagggt

SEQ ID NO: 826414 - DNA, 21 bp, Artificial Sequence
  Synthetic
gaccacaagctgacttggggg

SEQ ID NO: 826415 - DNA, 27 bp, Artificial Sequence
  Synthetic
gaccacaagctgacttgggggaggaat

SEQ ID NO: 826416 - DNA, 21 bp, Artificial Sequence
  Synthetic
gttggggttgcaacacatgct

SEQ ID NO: 826417 - DNA, 27 bp, Artificial Sequence
  Synthetic
gttggggttgcaacacatgctgtgagt

SEQ ID NO: 826418 - DNA, 21 bp, Artificial Sequence
  Synthetic
gaataaaatccatataaccat

SEQ ID NO: 826419 - DNA, 27 bp, Artificial Sequence
  Synthetic
gaataaaatccatataaccatttgagt

SEQ ID NO: 826420 - DNA, 21 bp, Artificial Sequence
  Synthetic
gcccagtgtcaccccaatgga

SEQ ID NO: 826421 - DNA, 27 bp, Artificial Sequence
  Synthetic
gcccagtgtcaccccaatggagtgaat

SEQ ID NO: 826422 - DNA, 21 bp, Artificial Sequence
  Synthetic
gattaaacagaaaaatgcaca

SEQ ID NO: 826423 - DNA, 27 bp, Artificial Sequence
  Synthetic
gattaaacagaaaaatgcacaaagaat

SEQ ID NO: 826424 - DNA, 21 bp, Artificial Sequence
  Synthetic
gagtagaggtgctaaaataag

SEQ ID NO: 826425 - DNA, 27 bp, Artificial Sequence
  Synthetic
gagtagaggtgctaaaataagatggat

SEQ ID NO: 826426 - DNA, 21 bp, Artificial Sequence
  Synthetic
ggaagctgatccctaggaagc

SEQ ID NO: 826427 - DNA, 27 bp, Artificial Sequence
  Synthetic
ggaagctgatccctaggaagcaagaat

SEQ ID NO: 826428 - DNA, 21 bp, Artificial Sequence
  Synthetic
gtgagggcctgacacatggta

SEQ ID NO: 826429 - DNA, 27 bp, Artificial Sequence
  Synthetic
gtgagggcctgacacatggtagaggat

SEQ ID NO: 826430 - DNA, 21 bp, Artificial Sequence
  Synthetic
gcatggatttgtatccattat

SEQ ID NO: 826431 - DNA, 27 bp, Artificial Sequence
  Synthetic
gcatggatttgtatccattatctgggt

SEQ ID NO: 826432 - DNA, 21 bp, Artificial Sequence
  Synthetic
gctctgttgcaatactccaga

SEQ ID NO: 826433 - DNA, 27 bp, Artificial Sequence
  Synthetic
gctctgttgcaatactccagactgggt

SEQ ID NO: 826434 - DNA, 21 bp, Artificial Sequence
  Synthetic
gttagattctagggatacaat

SEQ ID NO: 826435 - DNA, 27 bp, Artificial Sequence
  Synthetic
gttagattctagggatacaatatggat

SEQ ID NO: 826436 - DNA, 21 bp, Artificial Sequence
  Synthetic
gtggcttttagtatacaatga

SEQ ID NO: 826437 - DNA, 27 bp, Artificial Sequence
  Synthetic
gtggcttttagtatacaatgacagagt

SEQ ID NO: 826438 - DNA, 21 bp, Artificial Sequence
  Synthetic
gcaattaagacatatgttata

SEQ ID NO: 826439 - DNA, 27 bp, Artificial Sequence
  Synthetic
gcaattaagacatatgttatatagaat

SEQ ID NO: 826440 - DNA, 21 bp, Artificial Sequence
  Synthetic
gatcatttcttggtaggtgag

SEQ ID NO: 826441 - DNA, 27 bp, Artificial Sequence
  Synthetic
gatcatttcttggtaggtgagtggaat

SEQ ID NO: 826442 - DNA, 21 bp, Artificial Sequence
  Synthetic
gtttgttttctctttgagaac

SEQ ID NO: 826443 - DNA, 27 bp, Artificial Sequence
  Synthetic
gtttgttttctctttgagaacaggaat

SEQ ID NO: 826444 - DNA, 21 bp, Artificial Sequence
  Synthetic
ggtcttttagtatagcagaat

SEQ ID NO: 826445 - DNA, 27 bp, Artificial Sequence
  Synthetic
ggtcttttagtatagcagaatgggaat

SEQ ID NO: 826446 - DNA, 21 bp, Artificial Sequence
  Synthetic
gcagaagataaattacaagac

SEQ ID NO: 826447 - DNA, 27 bp, Artificial Sequence
  Synthetic
gcagaagataaattacaagacatgaat

SEQ ID NO: 826448 - DNA, 21 bp, Artificial Sequence
  Synthetic
gctcagctagtggaatccatg

SEQ ID NO: 826449 - DNA, 27 bp, Artificial Sequence
  Synthetic
gctcagctagtggaatccatgatgaat

SEQ ID NO: 826450 - DNA, 21 bp, Artificial Sequence
  Synthetic
gcattttcatttttggatgtt

SEQ ID NO: 826451 - DNA, 27 bp, Artificial Sequence
  Synthetic
gcattttcatttttggatgttaagggt

SEQ ID NO: 826452 - DNA, 21 bp, Artificial Sequence
  Synthetic
gtatcttcactttgtagcact

SEQ ID NO: 826453 - DNA, 27 bp, Artificial Sequence
  Synthetic
gtatcttcactttgtagcactcagaat

SEQ ID NO: 826454 - DNA, 21 bp, Artificial Sequence
  Synthetic
gaatatgcaggccttctatta

SEQ ID NO: 826455 - DNA, 27 bp, Artificial Sequence
  Synthetic
gaatatgcaggccttctattattgggt

SEQ ID NO: 826456 - DNA, 21 bp, Artificial Sequence
  Synthetic
gtggtgagtccactgatggat

SEQ ID NO: 826457 - DNA, 27 bp, Artificial Sequence
  Synthetic
gtggtgagtccactgatggatctggat

SEQ ID NO: 826458 - DNA, 21 bp, Artificial Sequence
  Synthetic
gtgtggaaaggcttgtatcat

SEQ ID NO: 826459 - DNA, 27 bp, Artificial Sequence
  Synthetic
gtgtggaaaggcttgtatcataagaat

SEQ ID NO: 826460 - DNA, 21 bp, Artificial Sequence
  Synthetic
ggaagggacatattctatggg

SEQ ID NO: 826461 - DNA, 27 bp, Artificial Sequence
  Synthetic
ggaagggacatattctatggggaggat

SEQ ID NO: 826462 - DNA, 21 bp, Artificial Sequence
  Synthetic
gtgaagatcatttcttggtag

SEQ ID NO: 826463 - DNA, 27 bp, Artificial Sequence
  Synthetic
gtgaagatcatttcttggtaggtgagt

SEQ ID NO: 826464 - DNA, 21 bp, Artificial Sequence
  Synthetic
gtacatctccctggcttgtat

SEQ ID NO: 826465 - DNA, 27 bp, Artificial Sequence
  Synthetic
gtacatctccctggcttgtatgggggt

SEQ ID NO: 826466 - DNA, 21 bp, Artificial Sequence
  Synthetic
gaattgcctaccctaaaatgt

SEQ ID NO: 826467 - DNA, 27 bp, Artificial Sequence
  Synthetic
gaattgcctaccctaaaatgtttgaat

SEQ ID NO: 826468 - DNA, 21 bp, Artificial Sequence
  Synthetic
gccttctgattttgccaaatt

SEQ ID NO: 826469 - DNA, 27 bp, Artificial Sequence
  Synthetic
gccttctgattttgccaaattctgagt

SEQ ID NO: 826470 - DNA, 21 bp, Artificial Sequence
  Synthetic
gagtaagcccgatcattattg

SEQ ID NO: 826471 - DNA, 27 bp, Artificial Sequence
  Synthetic
gagtaagcccgatcattattgaggggt

SEQ ID NO: 826472 - DNA, 21 bp, Artificial Sequence
  Synthetic
gtgaaggaaatgaccacatat

SEQ ID NO: 826473 - DNA, 27 bp, Artificial Sequence
  Synthetic
gtgaaggaaatgaccacatatgggaat

SEQ ID NO: 826474 - DNA, 21 bp, Artificial Sequence
  Synthetic
gtgtggaggggaagaactaag

SEQ ID NO: 826475 - DNA, 27 bp, Artificial Sequence
  Synthetic
gtgtggaggggaagaactaagttgaat

SEQ ID NO: 826476 - DNA, 21 bp, Artificial Sequence
  Synthetic
gacttccagaattatgtgttc

SEQ ID NO: 826477 - DNA, 27 bp, Artificial Sequence
  Synthetic
gacttccagaattatgtgttccagggt

SEQ ID NO: 826478 - DNA, 21 bp, Artificial Sequence
  Synthetic
gcttcccatgtcacagatgac

SEQ ID NO: 826479 - DNA, 27 bp, Artificial Sequence
  Synthetic
gcttcccatgtcacagatgaccagagt

SEQ ID NO: 826480 - DNA, 21 bp, Artificial Sequence
  Synthetic
gcatattctcatggtggccac

SEQ ID NO: 826481 - DNA, 27 bp, Artificial Sequence
  Synthetic
gcatattctcatggtggccacttgggt

SEQ ID NO: 826482 - DNA, 21 bp, Artificial Sequence
  Synthetic
gcttttcaccaaatatgtttt

SEQ ID NO: 826483 - DNA, 27 bp, Artificial Sequence
  Synthetic
gcttttcaccaaatatgttttctgagt

SEQ ID NO: 826484 - DNA, 21 bp, Artificial Sequence
  Synthetic
gctttagtcataacaaacaag

SEQ ID NO: 826485 - DNA, 27 bp, Artificial Sequence
  Synthetic
gctttagtcataacaaacaagtagaat

SEQ ID NO: 826486 - DNA, 21 bp, Artificial Sequence
  Synthetic
gattcattgctttaatcacac

SEQ ID NO: 826487 - DNA, 27 bp, Artificial Sequence
  Synthetic
gattcattgctttaatcacacaagagt

SEQ ID NO: 826488 - DNA, 21 bp, Artificial Sequence
  Synthetic
gtgtattgcttgtactactca

SEQ ID NO: 826489 - DNA, 27 bp, Artificial Sequence
  Synthetic
gtgtattgcttgtactactcactgaat

SEQ ID NO: 826490 - DNA, 21 bp, Artificial Sequence
  Synthetic
ggacaaccagtgaacgattct

SEQ ID NO: 826491 - DNA, 27 bp, Artificial Sequence
  Synthetic
ggacaaccagtgaacgattctaagaat

SEQ ID NO: 826492 - DNA, 21 bp, Artificial Sequence
  Synthetic
gaaaggagctaaatatccaga

SEQ ID NO: 826493 - DNA, 27 bp, Artificial Sequence
  Synthetic
gaaaggagctaaatatccagagaggat

SEQ ID NO: 826494 - DNA, 21 bp, Artificial Sequence
  Synthetic
gctagacctctccatcatcct

SEQ ID NO: 826495 - DNA, 27 bp, Artificial Sequence
  Synthetic
gctagacctctccatcatcctctgaat

SEQ ID NO: 826496 - DNA, 21 bp, Artificial Sequence
  Synthetic
gaggtgctcaattgattccct

SEQ ID NO: 826497 - DNA, 27 bp, Artificial Sequence
  Synthetic
gaggtgctcaattgattccctttgaat

SEQ ID NO: 826498 - DNA, 21 bp, Artificial Sequence
  Synthetic
ggagaaaagcaggaaatagct

SEQ ID NO: 826499 - DNA, 27 bp, Artificial Sequence
  Synthetic
ggagaaaagcaggaaatagctctgaat

SEQ ID NO: 826500 - DNA, 21 bp, Artificial Sequence
  Synthetic
gaatggagagaggtaagtctg

SEQ ID NO: 826501 - DNA, 27 bp, Artificial Sequence
  Synthetic
gaatggagagaggtaagtctggagggt

SEQ ID NO: 826502 - DNA, 21 bp, Artificial Sequence
  Synthetic
gaacagaattacacctttctt

SEQ ID NO: 826503 - DNA, 27 bp, Artificial Sequence
  Synthetic
gaacagaattacacctttcttgtgggt

SEQ ID NO: 826504 - DNA, 21 bp, Artificial Sequence
  Synthetic
gagacccaaagtttctgactt

SEQ ID NO: 826505 - DNA, 27 bp, Artificial Sequence
  Synthetic
gagacccaaagtttctgactttagaat

SEQ ID NO: 826506 - DNA, 21 bp, Artificial Sequence
  Synthetic
gcagggtcgtattgttgtgcc

SEQ ID NO: 826507 - DNA, 27 bp, Artificial Sequence
  Synthetic
gcagggtcgtattgttgtgccaaggat

SEQ ID NO: 826508 - DNA, 21 bp, Artificial Sequence
  Synthetic
gatttgttttgctaagagtgc

SEQ ID NO: 826509 - DNA, 27 bp, Artificial Sequence
  Synthetic
gatttgttttgctaagagtgcctgaat

SEQ ID NO: 826510 - DNA, 21 bp, Artificial Sequence
  Synthetic
gattaaatagggtacacggga

SEQ ID NO: 826511 - DNA, 27 bp, Artificial Sequence
  Synthetic
gattaaatagggtacacgggaaaggat

SEQ ID NO: 826512 - DNA, 21 bp, Artificial Sequence
  Synthetic
gataggggcataagaaacggg

SEQ ID NO: 826513 - DNA, 27 bp, Artificial Sequence
  Synthetic
gataggggcataagaaacggggtgaat

SEQ ID NO: 826514 - DNA, 21 bp, Artificial Sequence
  Synthetic
gagggaaaaccacaattttag

SEQ ID NO: 826515 - DNA, 27 bp, Artificial Sequence
  Synthetic
gagggaaaaccacaattttagtagagt

SEQ ID NO: 826516 - DNA, 21 bp, Artificial Sequence
  Synthetic
gtttaaatgtaaatagctcag

SEQ ID NO: 826517 - DNA, 27 bp, Artificial Sequence
  Synthetic
gtttaaatgtaaatagctcagttgagt

SEQ ID NO: 826518 - DNA, 21 bp, Artificial Sequence
  Synthetic
gtactctgtatgctctgtact

SEQ ID NO: 826519 - DNA, 27 bp, Artificial Sequence
  Synthetic
gtactctgtatgctctgtactcagaat

SEQ ID NO: 826520 - DNA, 21 bp, Artificial Sequence
  Synthetic
gtgttattacttgctactgca

SEQ ID NO: 826521 - DNA, 27 bp, Artificial Sequence
  Synthetic
gtgttattacttgctactgcagagagt

SEQ ID NO: 826522 - DNA, 21 bp, Artificial Sequence
  Synthetic
gaaacataaagttgtacaaca

SEQ ID NO: 826523 - DNA, 27 bp, Artificial Sequence
  Synthetic
gaaacataaagttgtacaacatagaat

SEQ ID NO: 826524 - DNA, 21 bp, Artificial Sequence
  Synthetic
ggcaattctcctgaatagaaa

SEQ ID NO: 826525 - DNA, 27 bp, Artificial Sequence
  Synthetic
ggcaattctcctgaatagaaactgggt

SEQ ID NO: 826526 - DNA, 21 bp, Artificial Sequence
  Synthetic
gtggatagcttgatggataat

SEQ ID NO: 826527 - DNA, 27 bp, Artificial Sequence
  Synthetic
gtggatagcttgatggataatgtgaat

SEQ ID NO: 826528 - DNA, 21 bp, Artificial Sequence
  Synthetic
gctagtgaaaggttagcttac

SEQ ID NO: 826529 - DNA, 27 bp, Artificial Sequence
  Synthetic
gctagtgaaaggttagcttacttgaat

SEQ ID NO: 826530 - DNA, 21 bp, Artificial Sequence
  Synthetic
gcttttcaccaaatatgtttt

SEQ ID NO: 826531 - DNA, 27 bp, Artificial Sequence
  Synthetic
gcttttcaccaaatatgttttctgagt

SEQ ID NO: 826532 - DNA, 21 bp, Artificial Sequence
  Synthetic
gtttatttccatgggcatcaa

SEQ ID NO: 826533 - DNA, 27 bp, Artificial Sequence
  Synthetic
gtttatttccatgggcatcaaatggat

SEQ ID NO: 826534 - DNA, 21 bp, Artificial Sequence
  Synthetic
gaggttgggtgacagtcatct

SEQ ID NO: 826535 - DNA, 27 bp, Artificial Sequence
  Synthetic
gaggttgggtgacagtcatcttagggt

SEQ ID NO: 826536 - DNA, 21 bp, Artificial Sequence
  Synthetic
gccccttaaataaaaaggtca

SEQ ID NO: 826537 - DNA, 27 bp, Artificial Sequence
  Synthetic
gccccttaaataaaaaggtcatagagt

SEQ ID NO: 826538 - DNA, 21 bp, Artificial Sequence
  Synthetic
ggcaaacataaacttccttat

SEQ ID NO: 826539 - DNA, 27 bp, Artificial Sequence
  Synthetic
ggcaaacataaacttccttatcagaat

SEQ ID NO: 826540 - DNA, 22 bp, Artificial Sequence
  Synthetic
gtttcattggctttgatttccc

SEQ ID NO: 826541 - DNA, 6 bp, Artificial Sequence
  Synthetic
tagggt

SEQ ID NO: 826542 - DNA, 22 bp, Artificial Sequence
  Synthetic
gatacaatattttcttaaaaat

SEQ ID NO: 826543 - DNA, 6 bp, Artificial Sequence
  Synthetic
gcgagt

SEQ ID NO: 826544 - DNA, 22 bp, Artificial Sequence
  Synthetic
gaactggtgggaaatggtctag

SEQ ID NO: 826545 - DNA, 6 bp, Artificial Sequence
  Synthetic
gagagt

SEQ ID NO: 826546 - DNA, 22 bp, Artificial Sequence
  Synthetic
gattatacttaggctgaatagt

SEQ ID NO: 826547 - DNA, 6 bp, Artificial Sequence
  Synthetic
gagagt

SEQ ID NO: 826548 - DNA, 22 bp, Artificial Sequence
  Synthetic
gcagaatcaaatataatagtct

SEQ ID NO: 826549 - DNA, 6 bp, Artificial Sequence
  Synthetic
gggaat

SEQ ID NO: 826550 - DNA, 21 bp, Artificial Sequence
  Synthetic
cctgctctggcagatttcaac

SEQ ID NO: 826551 - DNA, 19 bp, Artificial Sequence
  Synthetic
acccaccatcaccctctgt

SEQ ID NO: 826552 - DNA, 23 bp, Artificial Sequence
  Synthetic
aaagccagtcggtaagttctgtc

SEQ ID NO: 826553 - DNA, 85 bp, Artificial Sequence
  Synthetic
caaattaatttacttcctattcaagggaattttaaatcagaaaatgattgtggtcaagccatctctggatcttcgtttcctattc

SEQ ID NO: 826554 - DNA, 27 bp, Artificial Sequence
  Synthetic
caaattaatttacttcctatcctattc

SEQ ID NO: 826555 - DNA, 44 bp, Artificial Sequence
  Synthetic
caaattaatttacttcctattctctggatcttcgtttcctattc

SEQ ID NO: 826556 - DNA, 30 bp, Artificial Sequence
  Synthetic
caaattaatttacttcttcgtttcctattc

SEQ ID NO: 826557 - DNA, 21 bp, Artificial Sequence
  Synthetic
ctggatcttcgtttcctattc

SEQ ID NO: 826558 - DNA, 57 bp, Artificial Sequence
  Synthetic
  misc_feature (31)..(31): n is a, c, g, or t
  misc_feature (43)..(43): n is a, c, g, or t
  misc_feature (52)..(52): n is a, c, g, or t
caaattaatttacttcctattagaagggaangaagggagggangaagaaaanggaag

SEQ ID NO: 826559 - DNA, 45 bp, Artificial Sequence
  Synthetic
caaattaatttacttcctatttctctggatcttcgtttcctattc

SEQ ID NO: 826560 - DNA, 89 bp, Artificial Sequence
  Synthetic
tgtggctttaccaaggtcccagagttcctagggcagagaacaggagtctcagttaaatttactaaacaacctggtattttaaaaatcta

SEQ ID NO: 826561 - DNA, 39 bp, Artificial Sequence
  Synthetic
tgtggctttaccaaggtcccagggtattttaaaaatcta

SEQ ID NO: 826562 - DNA, 61 bp, Artificial Sequence
  Synthetic
tgtgccttacaagaatagttgtctcagttaaatttactaaatttggtattttaaaaatcta

SEQ ID NO: 826563 - DNA, 38 bp, Artificial Sequence
  Synthetic
tgtggctttaccaaggtccctggtattttaaaaatcta

SEQ ID NO: 826564 - DNA, 25 bp, Artificial Sequence
  Synthetic
tgtggctttaccaaggaaaaatcta

SEQ ID NO: 826565 - DNA, 43 bp, Artificial Sequence
  Synthetic
tgtggctttaccaaggtcccagagctggtattttaaaaatcta

SEQ ID NO: 826566 - DNA, 44 bp, Artificial Sequence
  Synthetic
tgtggctttaccaaggtcccagagcctggtattttaaaaatcta

SEQ ID NO: 826567 - DNA, 24 bp, Artificial Sequence
  Synthetic
tgtggctttaccaaggtcccagag

SEQ ID NO: 826568 - DNA, 87 bp, Artificial Sequence
  Synthetic
tgtggctttaccaaggtcccagagttcctagggcagagaacaggaatgattgtggtcaagccatctctggatcttcgtttcctattc

SEQ ID NO: 826569 - DNA, 47 bp, Artificial Sequence
  Synthetic
tgtggctttaccaaggtcccagagctctggatcttcgtttcctattc

SEQ ID NO: 826570 - DNA, 49 bp, Artificial Sequence
  Synthetic
tgtggctttaccaaggtcccagagaactctggatcttcgtttcctattc

SEQ ID NO: 826571 - DNA, 29 bp, Artificial Sequence
  Synthetic
tgtggctttaccaaggtcgtttcctattc

SEQ ID NO: 826572 - DNA, 46 bp, Artificial Sequence
  Synthetic
gtaaagccacataacctctctaagtctggatcttcgtttcctattc

SEQ ID NO: 826573 - DNA, 48 bp, Artificial Sequence
  Synthetic
tgtggctttaccaaggtcccagagtctctggatcttcgtttcctattc

SEQ ID NO: 826574 - DNA, 48 bp, Artificial Sequence
  Synthetic
tgtggctttaccaaggtcccagagactctggatcttcgtttcctattc

SEQ ID NO: 826575 - DNA, 51 bp, Artificial Sequence
  Synthetic
tgtggctttaccaaggtcccagagttctctctggatcttcgtttcctattc

SEQ ID NO: 826576 - DNA, 48 bp, Artificial Sequence; identical to SEQ ID NO: 826573
  Synthetic

SEQ ID NO: 826577 - DNA, 24 bp, Artificial Sequence
  Synthetic
tgtggctttaccaaggtcccagag

SEQ ID NO: 826578 - DNA, 45 bp, Artificial Sequence
  Synthetic
tgtggctttaccaaggtcccagagttcctagggcagagaacagga

SEQ ID NO: 826579 - DNA, 88 bp, Artificial Sequence
  Synthetic
acctaacactattgatcacctactatagtgtcaggcgctgtaataaaataacaaaagtagccatacattaaaaaggaaatatacaaaa

SEQ ID NO: 826580 - DNA, 42 bp, Artificial Sequence
  Synthetic
acctaacactattgatcacctactaaaaggaaatatacaaaa

SEQ ID NO: 826581 - DNA, 36 bp, Artificial Sequence
  Synthetic
acctaacactattgatcacctaggaaatatacaaaa

SEQ ID NO: 826582 - DNA, 89 bp, Artificial Sequence
  Synthetic
taacactattgatcacctactatagtgtcaggcgctgtaataattcctgcagaagttaccagataatagattgggagagaaagtccaca

SEQ ID NO: 826583 - DNA, 67 bp, Artificial Sequence
  Synthetic
taacactattgatcacctactcttctcacttgattatttctagaaattttaataaaaatagtccaca

SEQ ID NO: 826584 - DNA, 43 bp, Artificial Sequence
  Synthetic
taacactattgatcacctactagattgggagagaaagtccaca

SEQ ID NO: 826585 - DNA, 44 bp, Artificial Sequence
  Synthetic
taacactattgatcacctacttagattgggagagaaagtccaca

SEQ ID NO: 826586 - DNA, 37 bp, Artificial Sequence
  Synthetic
taacactattgatctagattgggagagaaagtccaca

SEQ ID NO: 826587 - DNA, 42 bp, Artificial Sequence
  Synthetic
taacactattgatcacctactgattgggagagaaagtccaca

SEQ ID NO: 826588 - DNA, 82 bp, Artificial Sequence
  Synthetic
taacactattgatcacctactatatgtcagaagttagctggtttgaagtttaaaaagagtagattgggagagaaagtccaca

SEQ ID NO: 826589 - DNA, 29 bp, Artificial Sequence
  Synthetic
taacactattgatcacctactagtccaca

SEQ ID NO: 826590 - DNA, 39 bp, Artificial Sequence
  Synthetic
taacactattgatcacctacttgggagagaaagtccaca

SEQ ID NO: 826591 - DNA, 88 bp, Artificial Sequence
  Synthetic
caaattaatttacttcctattcaagggaattttaaatcagaaattggtgagaatcatattctgtagtacaaggaggctcttaaagttt

SEQ ID NO: 826592 - DNA, 43 bp, Artificial Sequence
  Synthetic
caaattaatttacttcctatttacaaggaggctcttaaagttt

SEQ ID NO: 826593 - DNA, 42 bp, Artificial Sequence
  Synthetic
caaattaatttacttcctattacaaggaggctcttaaagttt

SEQ ID NO: 826594 - DNA, 17 bp, Artificial Sequence
  Synthetic
caaattaattaaagttt

SEQ ID NO: 826595 - DNA, 14 bp, Artificial Sequence
  Synthetic
caaattaatttact

SEQ ID NO: 826596 - DNA, 37 bp, Artificial Sequence
  Synthetic
caaattaatttacttcctattgaggctcttaaagttt

SEQ ID NO: 826597 - DNA, 87 bp, Artificial Sequence
  Synthetic
gctttaccaaggtcccagagttcctagggcagagaacaggatttggtgagaatcatattctgtagtacaaggaggctcttaaagttt

SEQ ID NO: 826598 - DNA, 42 bp, Artificial Sequence
  Synthetic
gctttaccaaggtcccagagtacaaggaggctcttaaagttt

SEQ ID NO: 826599 - DNA, 41 bp, Artificial Sequence
  Synthetic
gctttaccaaggtcccagagacaaggaggctcttaaagttt

SEQ ID NO: 826600 - DNA, 42 bp, Artificial Sequence
  Synthetic
gctctaccaaggtcccagagtacaaggaggctcttaaagttt

SEQ ID NO: 826601 - DNA, 38 bp, Artificial Sequence
  Synthetic
gctttaccaaggtccctacaaggaggctcttaaagttt

SEQ ID NO: 826602 - DNA, 82 bp, Artificial Sequence
  Synthetic
taacactattgatcacctactatagtgtcaggcgctgtaataattactagtctctcaaatacaatttggatataaatcatta

SEQ ID NO: 826603 - DNA, 41 bp, Artificial Sequence
  Synthetic
taacactattgatcacctactaatttggatataaatcatta

SEQ ID NO: 826604 - DNA, 40 bp, Artificial Sequence
  Synthetic
taacactattgatcacctactatttggatataaatcatta

SEQ ID NO: 826605 - DNA, 40 bp, Artificial Sequence
  Synthetic
taacactattgatcacctatatctcaaatataaatcatta

SEQ ID NO: 826606 - DNA, 34 bp, Artificial Sequence
  Synthetic
taacactattgatcacattggatataaatcatta

SEQ ID NO: 826607 - DNA, 70 bp, Artificial Sequence
  Synthetic
taacactattgatcacctactacctcatgatccgcagaaagccatttttttttttggatataaatcatta

SEQ ID NO: 826608 - DNA, 83 bp, Artificial Sequence
  Synthetic
taacactattgatcacctactatagtgtcaggcgctgtaataagagtacgtaacagtggcaatgtatggctcctgaatttatc

SEQ ID NO: 826609 - DNA, 36 bp, Artificial Sequence
  Synthetic
taacactattgatcacctatggctcctgaatttatc

SEQ ID NO: 826610 - DNA, 43 bp, Artificial Sequence
  Synthetic
taacactattgatcacctactatgtatggctcctgaatttatc

SEQ ID NO: 826611 - DNA, 42 bp, Artificial Sequence
  Synthetic
taacactattgatcacctacttgtatggctcctgaatttatc

SEQ ID NO: 826612 - DNA, 42 bp, Artificial Sequence
  Synthetic
taacactattgatcacctactagtatggctcctgaatttatc

SEQ ID NO: 826613 - DNA, 33 bp, Artificial Sequence
  Synthetic
taacactattgatcacctactcctgaatttatc

SEQ ID NO: 826614 - DNA, 72 bp, Artificial Sequence
  Synthetic
taacactattgatcacctactacagagactcttaaattcctcccatttttttgtatggctcctgaatttatc

SEQ ID NO: 826615 - DNA, 35 bp, Artificial Sequence
  Synthetic
taacactattgatctgtatggctcctgaatttatc

SEQ ID NO: 826616 - DNA, 26 bp, Artificial Sequence
  Synthetic
taacactattgatccctgaatttatc

SEQ ID NO: 826617 - DNA, 84 bp, Artificial Sequence
  Synthetic
tcaagagagtatggccaggacagcttgtgaatagttcagtaggtgagaatcatattctgtagtacaaggaggctcttaaagttt

SEQ ID NO: 826618 - DNA, 42 bp, Artificial Sequence
  Synthetic
tcaagagagtatggccaggatacaaggaggctcttaaagttt

SEQ ID NO: 826619 - DNA, 34 bp, Artificial Sequence
  Synthetic
tcaagagagtatgacaaggaggctcttaaagttt

SEQ ID NO: 826620 - DNA, 21 bp, Artificial Sequence
  Synthetic
tcaaggaggctcttaaagttt

SEQ ID NO: 826621 - DNA, 38 bp, Artificial Sequence
  Synthetic
tcaagagagtatggcctacaaggaggctcttaaagttt

SEQ ID NO: 826622 - DNA, 62 bp, Artificial Sequence
  Synthetic
tcaagagagtatggccatttataattccttccttcatattcacaaggaggctcttaaagttt

SEQ ID NO: 826623 - DNA, 81 bp, Artificial Sequence
  Synthetic
tcaagagagtatggccaggatcatgttgctggttgggtgagtctttttacgttacatgttacaaggaggctcttaaagttt

SEQ ID NO: 826624 - DNA, 28 bp, Artificial Sequence
  Synthetic
tcaagatacaaggaggctcttaaagttt

SEQ ID NO: 826625 - DNA, 34 bp, Artificial Sequence
  Synthetic
tcaagagagtatggccaggaggctcttaaagttt

SEQ ID NO: 826626 - DNA, 84 bp, Artificial Sequence
  Synthetic
aatggagcaaagccaactagttacaaggaaatatcacatgtggtgagaatcatattctgtagtacaaggaggctcttaaagttt

SEQ ID NO: 826627 - DNA, 42 bp, Artificial Sequence
  Synthetic
aatggagcaaagccaactaatacaaggaggctcttaaagttt

SEQ ID NO: 826628 - DNA, 41 bp, Artificial Sequence
  Synthetic
aatggagcaaagccaactatacaaggaggctcttaaagttt

SEQ ID NO: 826629 - DNA, 27 bp, Artificial Sequence
  Synthetic
aatggagcaaggaggctcttaaagttt

SEQ ID NO: 826630 - DNA, 36 bp, Artificial Sequence
  Synthetic
aatggagcaaagccaacaaggaggctcttaaagttt

SEQ ID NO: 826631 - DNA, 19 bp, Artificial Sequence
  Synthetic
aaggaggctcttaaagttt

SEQ ID NO: 826632 - DNA, 40 bp, Artificial Sequence
  Synthetic
aatggagcaaagccaacttacaaggaggctcttaaagttt

SEQ ID NO: 826633 - DNA, 42 bp, Artificial Sequence
  Synthetic
aatggagcaaagccaactgtaacaaggaggctcttaaagttt

SEQ ID NO: 826634 - DNA, 28 bp, Artificial Sequence
  Synthetic
aatggagcaaaggaggctcttaaagttt

SEQ ID NO: 826635 - DNA, 32 bp, Artificial Sequence
  Synthetic
aatggagcaaagccaagaggctcttaaagttt

SEQ ID NO: 826636 - DNA, 37 bp, Artificial Sequence
  Synthetic
aatggagcaaagccaactaaggaggctcttaaagttt

SEQ ID NO: 826637 - DNA, 82 bp, Artificial Sequence
  Synthetic
tatgtttgttctttttcacctctcgtatccacgatcactaagattactagtctctcaaatacaatttggatataaatcatta

SEQ ID NO: 826638 - DNA, 44 bp, Artificial Sequence
  Synthetic
tatgtttgttctttttcacctctcgatttggatataaatcatta

SEQ ID NO: 826639 - DNA, 48 bp, Artificial Sequence
  Synthetic
tatgtttgttctttttcacctctctttttacgtggatataaatcatta

SEQ ID NO: 826640 - DNA, 44 bp, Artificial Sequence
  Synthetic
tatgtttgttctttttcacctctcaatttggatataaatcatta

SEQ ID NO: 826641 - DNA, 31 bp, Artificial Sequence
  Synthetic
tatgtttgttctttttcacctctcatcatta

SEQ ID NO: 826642 - DNA, 70 bp, Artificial Sequence
  Synthetic
tatgtttgttctttttcacctcttttttatatcatatgatatatcaaaatgatttggatataaatcatta

SEQ ID NO: 826643 - DNA, 83 bp, Artificial Sequence
  Synthetic
tatgtttgttctttttcacctctcgtatccacgatcactaagagagtacgtaacagtggcaatgtatggctcctgaatttatc

SEQ ID NO: 826644 - DNA, 46 bp, Artificial Sequence
  Synthetic
tatgtttgttctttttcacctctcgtgtatggctcctgaatttatc

SEQ ID NO: 826645 - DNA, 39 bp, Artificial Sequence
  Synthetic
tatgtttgttctttttcacctctggctcctgaatttatc

SEQ ID NO: 826646 - DNA, 35 bp, Artificial Sequence
  Synthetic
tatgtttgttctttttcacctctcctgaatttatc

SEQ ID NO: 826647 - DNA, 45 bp, Artificial Sequence
  Synthetic
tatgtttgttctttttcacctctcgttatggctcctgaatttatc

SEQ ID NO: 826648 - DNA, 45 bp, Artificial Sequence
  Synthetic
tatgtttgttctttttcacctctctgtatggctcctgaatttatc

SEQ ID NO: 826649 - DNA, 13 bp, Artificial Sequence
  Synthetic
tatgtttgttctt
